(19) United States
(12) Patent Application Publication
(10) Pub. No.: US 2022/0183322 A1
(43) Pub. Date: Jun. 16, 2022

(54) REDOX ENZYMES IN ANIMAL FEED COMPOSITIONS

(71) Applicant: Novozymes A/S, Bagsvaerd (DK)

(72) Inventors: Ming Li, Beijing (CN); Kirk Matthew Schnorr, Holte (DK); Ye Liu, Beijing (CN); Lan Tang, Beijing (CN); Elodie Bacou, Kaiseraugst (SE); Luis Fernando Romero Millan, Kaiseraugst (SE); Maria Walsch, Kaiseraugst (SE); Estefania Perez Calvo, Kaiseraugst (SE); Peter Wagner, Kaiseraugst (SE)

(73) Assignee: Novozymes A/S, Bagsvaerd (DK)

(21) Appl. No.: 17/441,714

(22) PCT Filed: Apr. 5, 2020
(86) PCT No.: PCT/CN2020/083409

§ 371 Date: Sep. 22, 2021

(30) Foreign Application Priority Data
Apr. 5, 2019 (DK) PA 2019 00423
Aug. 16, 2019 (CN) PCT/CN2019/101080

(51) Int. Cl. A23K 20/189; A23K 20/147; A23K 20/174; C12N 9/02

(52) U.S. Cl. CPC A23K 20/189; A23K 20/147; C12Y 115/01001; C12N 9/0089; A23K 20/174

(57) ABSTRACT

Novel polypeptides of fungal origin with catalase active are active, gastric stable and thermal stable, and effective for use in animal feed additives. The use of fungal catalases in animal feed improve animal growth, animal health and intestinal health of animals

[0001] This application contains a Sequence Listing in computer readable form, which is incorporated herein by reference.

### FIELD OF THE INVENTION

[0002] The present invention relates to the use of polypeptides having catalase activity for
[0003] improving one or more performance parameters, wherein the one or more performance parameters is selected from the group consisting of the European Production Efficiency Factor (EPEF), Feed Conversion Ratio (FCR), Growth Rate (GR), Body Weight Gain (WG), Mortality Rate (MR) and Flock Uniformity (FU),
[0004] improving or enhancing immune response and/or reducing inflammation and/or for the modulation of the gut flora in an animal, and
[0005] reducing or eliminating the use of antibiotics administered to animal feed.
The present invention also relates to new polypeptides having catalase activity.

### BACKGROUND OF THE INVENTION

[0006] Catalases are able to degrade hydrogen peroxide into water and oxygen. A catalase is classified as an EC 1.11.1.6 catalase or as an EP 1.11.1.21 catalase peroxidase.

[0007] Known catalases of mammalian origin have been found to have low relative gastric stability thereby impeding their use in feed.

[0008] Surprisingly, the inventors of the present invention have found that catalases of fungal origin, have both high activity and gastric stability, and can therefore be used in an animal feed or animal feed additive. It has further been found that thee use of catalase in animal feed can to improve one or more performance parameters, enhance immune response and reduce inflammation in an animal and thus lead to many advantages such as improving animal health and/or animal performance, and/or reducing feeding cost.

### SUMMARY OF THE INVENTION

[0009] The present invention relates to animal feed additive comprising a polypeptide of fungal origin having catalase activity and optionally a polypeptide having superoxide dismutase activity. The present invention relates to an animal feed or animal feed additive comprising one or more polypeptides having catalase activity. The present invention relates to an animal feed or animal feed additive comprising one or more polypeptides having catalase activity. Alternatively defined, the present invention relates to an animal feed additive comprising at least one and no more than two enzyme classes, wherein the at least one enzyme class is a catalase and the optional second enzyme class is a superoxide dismutase of fungal or microbial origin. An aspect of the invention is directed to an animal feed additive comprising an enzyme component, wherein the enzyme component comprises all of the enzymes of the additive and consists of a catalase of fungal origin and optionally of a superoxide dismutase. Typically, the superoxide dismutase is of fungal or microbial origin.

[0010] A further aspect of the invention is directed to an animal feed additive comprising at least one and no more than two enzyme classes, wherein the at least one enzyme class is a catalase of fungal origin and the optional second enzyme class is a superoxide dismutase of fungal origin. In the feed additive or animal feed of the invention, the polypeptide having catalase activity of fungal origin is selected from the group consisting of
[0011] a. a polypeptide with catalase activity having at least 80%, at least 85%, at least 86%, at least 87%, at least 88%, at least 89%, at least 90%, at least 91%, at least 92%, at least 93%, at least 94%, at least 95%, at least 96%, at least 97%, at least 98%, at least 99%, or 100% sequence identity to SEQ ID NO: 6; and
[0012] b. a polypeptide with catalase activity having at least 80%, at least 85%, at least 86%, at least 87%, at least 88%, at least 89%, at least 90%, at least 91%, at least 92%, at least 93%, at least 94%, at least 95%, at least 96%, at least 97%, at least 98%, at least 99%, or 100% sequence identity to SEQ ID NO: 7
[0013] c. a polypeptide with catalase activity having at least 80%, at least 85%, at least 86%, at least 87%, at least 88%, at least 89%, at least 90%, at least 91%, at least 92%, at least 93%, at least 94%, at least 95%, at least 96%, at least 97%, at least 98%, at least 99%, or 100% sequence identity to SEQ ID NO: 103
[0014] d. a polypeptide with catalase activity having at least 80%, at least 85%, at least 86%, at least 87%, at least 88%, at least 89%, at least 90%, at least 91%, at least 92%, at least 93%, at least 94%, at least 95%, at least 96%, at least 97%, at least 98%, at least 99%, or 100% sequence identity to SEQ ID NO: 104;
[0015] e. a polypeptide with catalase activity having at least 80%, at least 85%, at least 86%, at least 87%, at least 88%, at least 89%, at least 90%, at least 91%, at least 92%, at least 93%, at least 94%, at least 95%, at least 96%, at least 97%, at least 98%, at least 99%, or 100% sequence identity to SEQ ID NO: 105;
[0016] f. a polypeptide with catalase activity having at least 80%, at least 85%, at least 86%, at least 87%, at least 88%, at least 89%, at least 90%, at least 91%, at least 92%, at least 93%, at least 94%, at least 95%, at least 96%, at least 97%, at least 98%, at least 99%, or 100% sequence identity to SEQ ID NO: 106;
[0017] g. a polypeptide with catalase activity having at least 80%, at least 85%, at least 86%, at least 87%, at least 88%, at least 89%, at least 90%, at least 91%, at least 92%, at least 93%, at least 94%, at least 95%, at least 96%, at least 97%, at least 98%, at least 99%, or 100% sequence identity to SEQ ID NO: 107;
[0018] h. a polypeptide with catalase activity having at least 80%, at least 85%, at least 86%, at least 87%, at least 88%, at least 89%, at least 90%, at least 91%, at least 92%, at least 93%, at least 94%, at least 95%, at least 96%, at least 97%, at least 98%, at least 99%, or 100% sequence identity to SEQ ID NO: 108;
[0019] i. a polypeptide with catalase activity having at least 80%, at least 85%, at least 86%, at least 87%, at least 88%, at least 89%, at least 90%, at least 91%, at least 92%, at least 93%, at least 94%, at least 95%, at least 96%, at least 97%, at least 98%, at least 99%, or 100% sequence identity to SEQ ID NO: 109
[0020] j. a polypeptide with catalase activity having at least 80%, at least 85%, at least 86%, at least 87%, at least 88%, at least 89%, at least 90%, at least 91%, at least 92%, at least 93%, at least 94%, at least 95%, at least 96%, at least 97%, at least 98%, at least 99%, or 100% sequence identity to SEQ ID NO: 110
[0021] k. a polypeptide with catalase activity having at least 80%, at least 85%, at least 86%, at least 87%, at least 88%, at least 89%, at least 90%, at least 91%, at least 92%, at least 93%, at least 94%, at least 95%, at least 96%, at least 97%, at least 98%, at least 99%, or 100% sequence identity to SEQ ID NO: 111
[0022] l. a polypeptide with catalase activity having at least 80%, at least 85%, at least 86%, at least 87%, at least 88%, at least 89%, at least 90%, at least 91%, at least 92%, at least 93%, at least 94%, at least 95%, at least 96%, at least 97%, at least 98%, at least 99%, or 100% sequence identity to SEQ ID NO: 112
[0023] m. a polypeptide with catalase activity having at least 80%, at least 85%, at least 86%, at least 87%, at least 88%, at least 89%, at least 90%, at least 91%, at least 92%, at least 93%, at least 94%, at least 95%, at least 96%, at least 97%, at least 98%, at least 99%, or 100% sequence identity to SEQ ID NO: 113
[0024] n. a polypeptide with catalase activity having at least 80%, at least 85%, at least 86%, at least 87%, at least 88%, at least 89%, at least 90%, at least 91%, at least 92%, at least 93%, at least 94%, at least 95%, at least 96%, at least 97%, at least 98%, at least 99%, or 100% sequence identity to SEQ ID NO: 114
[0025] o. a polypeptide with catalase activity having at least 80%, at least 85%, at least 86%, at least 87%, at least 88%, at least 89%, at least 90%, at least 91%, at least 92%, at least 93%, at least 94%, at least 95%, at least 96%, at least 97%, at least 98%, at least 99%, or 100% sequence identity to SEQ ID NO: 115
[0026] p. a polypeptide with catalase activity having at least 80%, at least 85%, at least 86%, at least 87%, at least 88%, at least 89%, at least 90%, at least 91%, at least 92%, at least 93%, at least 94%, at least 95%, at least 96%, at least 97%, at least 98%, at least 99%, or 100% sequence identity to SEQ ID NO: 116
[0027] q. a polypeptide with catalase activity having at least 80%, at least 85%, at least 86%, at least 87%, at least 88%, at least 89%, at least 90%, at least 91%, at least 92%, at least 93%, at least 94%, at least 95%, at least 96%, at least 97%, at least 98%, at least 99%, or 100% sequence identity to SEQ ID NO: 117
[0028] r. a polypeptide with catalase activity having at least 80%, at least 85%, at least 86%, at least 87%, at least 88%, at least 89%, at least 90%, at least 91%, at least 92%, at least 93%, at least 94%, at least 95%, at least 96%, at least 97%, at least 98%, at least 99%, or 100% sequence identity to SEQ ID NO: 118
[0029] s. a polypeptide with catalase activity having at least 80%, at least 85%, at least 86%, at least 87%, at least 88%, at least 89%, at least 90%, at least 91%, at least 92%, at least 93%, at least 94%, at least 95%, at least 96%, at least 97%, at least 98%, at least 99%, or 100% sequence identity to SEQ ID NO: 119
[0030] t. a polypeptide with catalase activity having at least 80%, at least 85%, at least 86%, at least 87%, at least 88%, at least 89%, at least 90%, at least 91%, at least 92%, at least 93%, at least 94%, at least 95%, at least 96%, at least 97%, at least 98%, at least 99%, or 100% sequence identity to SEQ ID NO: 120
[0031] u. a polypeptide with catalase activity having at least 80%, at least 85%, at least 86%, at least 87%, at least 88%, at least 89%, at least 90%, at least 91%, at least 92%, at least 93%, at least 94%, at least 95%, at least 96%, at least 97%, at least 98%, at least 99%, or 100% sequence identity to SEQ ID NO: 121
[0032] v. a polypeptide with catalase activity having at least 80%, at least 85%, at least 86%, at least 87%, at least 88%, at least 89%, at least 90%, at least 91%, at least 92%, at least 93%, at least 94%, at least 95%, at least 96%, at least 97%, at least 98%, at least 99%, or 100% sequence identity to SEQ ID NO: 122
[0033] w. a polypeptide with catalase activity having at least 80%, at least 85%, at least 86%, at least 87%, at least 88%, at least 89%, at least 90%, at least 91%, at least 92%, at least 93%, at least 94%, at least 95%, at least 96%, at least 97%, at least 98%, at least 99%, or 100% sequence identity to SEQ ID NO: 123
[0034] x. a polypeptide with catalase activity having at least 80%, at least 85%, at least 86%, at least 87%, at least 88%, at least 89%, at least 90%, at least 91%, at least 92%, at least 93%, at least 94%, at least 95%, at least 96%, at least 97%, at least 98%, at least 99%, or 100% sequence identity to SEQ ID NO: 124
[0035] y. a polypeptide with catalase activity having at least 80%, at least 85%, at least 86%, at least 87%, at least 88%, at least 89%, at least 90%, at least 91%, at least 92%, at least 93%, at least 94%, at least 95%, at least 96%, at least 97%, at least 98%, at least 99%, or 100% sequence identity to SEQ ID NO: 125
[0036] z. a polypeptide with catalase activity having at least 80%, at least 85%, at least 86%, at least 87%, at least 88%, at least 89%, at least 90%, at least 91%, at least 92%, at least 93%, at least 94%, at least 95%, at least 96%, at least 97%, at least 98%, at least 99%, or 100% sequence identity to SEQ ID NO: 126;
[0037] aa. a polypeptide with catalase activity having at least 80%, at least 85%, at least 86%, at least 87%, at least 88%, at least 89%, at least 90%, at least 91%, at least 92%, at least 93%, at least 94%, at least 95%, at least 96%, at least 97%, at least 98%, at least 99%, or 100% sequence identity to SEQ ID NO: 250;
[0038] bb. a polypeptide with catalase activity having at least 80%, at least 85%, at least 86%, at least 87%, at least 88%, at least 89%, at least 90%, at least 91%, at least 92%, at least 93%, at least 94%, at least 95%, at least 96%, at least 97%, at least 98%, at least 99%, or 100% sequence identity to SEQ ID NO 151;
[0039] cc. a polypeptide with catalase activity having at least 80%, at least 85%, at least 86%, at least 87%, at least 88%, at least 89%, at least 90%, at least 91%, at least 92%, at least 93%, at least 94%, at least 95%, at least 96%, at least 97%, at least 98%, at least 99%, or 100% sequence identity to SEQ ID NO 152;
[0040] dd. a polypeptide with catalase activity having at least 80%, at least 85%, at least 86%, at least 87%, at least 88%, at least 89%, at least 90%, at least 91%, at least 92%, at least 93%, at least 94%, at least 95%, at least 96%, at least 97%, at least 98%, at least 99%, or 100% sequence identity to SEQ ID NO 153;
[0041] ee. a polypeptide with catalase activity having at least 80%, at least 85%, at least 86%, at least 87%, at least 88%, at least 89%, at least 90%, at least 91%, at least 92%, at least 93%, at least 94%, at least 95%, at least 96%, at least 97%, at least 98%, at least 99%, or 100% sequence identity to SEQ ID NO 154;
[0042] ff. a polypeptide with catalase activity having at least 80%, at least 85%, at least 86%, at least 87%, at least 88%, at least 89%, at least 90%, at least 91%, at least 92%, at least 93%, at least 94%, at least 95%, at least 96%, at least 97%, at least 98%, at least 99%, or 100% sequence identity to SEQ ID NO 155;
[0043] gg. a polypeptide with catalase activity having at least 80%, at least 85%, at least 86%, at least 87%, at least 88%, at least 89%, at least 90%, at least 91%, at least 92%, at least 93%, at least 94%, at least 95%, at least 96%, at least 97%, at least 98%, at least 99%, or 100% sequence identity to SEQ ID NO 156;
[0044] hh. a polypeptide with catalase activity having at least 80%, at least 85%, at least 86%, at least 87%, at least 88%, at least 89%, at least 90%, at least 91%, at least 92%, at least 93%, at least 94%, at least 95%, at least 96%, at least 97%, at least 98%, at least 99%, or 100% sequence identity to SEQ ID NO 157;
[0045] ii. a polypeptide with catalase activity having at least 80%, at least 85%, at least 86%, at least 87%, at least 88%, at least 89%, at least 90%, at least 91%, at least 92%, at least 93%, at least 94%, at least 95%, at least 96%, at least 97%, at least 98%, at least 99%, or 100% sequence identity to SEQ ID NO 158;
[0046] jj. a polypeptide with catalase activity having at least 80%, at least 85%, at least 86%, at least 87%, at least 88%, at least 89%, at least 90%, at least 91%, at least 92%, at least 93%, at least 94%, at least 95%, at least 96%, at least 97%, at least 98%, at least 99%, or 100% sequence identity to SEQ ID NO 159;
[0047] kk. a polypeptide with catalase activity having at least 80%, at least 85%, at least 86%, at least 87%, at least 88%, at least 89%, at least 90%, at least 91%, at least 92%, at least 93%, at least 94%, at least 95%, at least 96%, at least 97%, at least 98%, at least 99%, or 100% sequence identity to SEQ ID NO 160;
[0048] ll. a polypeptide with catalase activity having at least 80%, at least 85%, at least 86%, at least 87%, at least 88%, at least 89%, at least 90%, at least 91%, at least 92%, at least 93%, at least 94%, at least 95%, at least 96%, at least 97%, at least 98%, at least 99%, or 100% sequence identity to SEQ ID NO 161;
[0049] mm. a polypeptide with catalase activity having at least 80%, at least 85%, at least 86%, at least 87%, at least 88%, at least 89%, at least 90%, at least 91%, at least 92%, at least 93%, at least 94%, at least 95%, at least 96%, at least 97%, at least 98%, at least 99%, or 100% sequence identity to SEQ ID NO 162;
[0050] nn. a polypeptide with catalase activity having at least 80%, at least 85%, at least 86%, at least 87%, at least 88%, at least 89%, at least 90%, at least 91%, at least 92%, at least 93%, at least 94%, at least 95%, at least 96%, at least 97%, at least 98%, at least 99%, or 100% sequence identity to SEQ ID NO 163;
[0051] oo. a polypeptide with catalase activity having at least 80%, at least 85%, at least 86%, at least 87%, at least 88%, at least 89%, at least 90%, at least 91%, at least 92%, at least 93%, at least 94%, at least 95%, at least 96%, at least 97%, at least 98%, at least 99%, or 100% sequence identity to SEQ ID NO 164;
[0052] pp. a polypeptide with catalase activity having at least 80%, at least 85%, at least 86%, at least 87%, at least 88%, at least 89%, at least 90%, at least 91%, at least 92%, at least 93%, at least 94%, at least 95%, at least 96%, at least 97%, at least 98%, at least 99%, or 100% sequence identity to SEQ ID NO 165;
[0053] qq. a polypeptide with catalase activity having at least 80%, at least 85%, at least 86%, at least 87%, at least 88%, at least 89%, at least 90%, at least 91%, at least 92%, at least 93%, at least 94%, at least 95%, at least 96%, at least 97%, at least 98%, at least 99%, or 100% sequence identity to SEQ ID NO 166;
[0054] rr. a polypeptide with catalase activity having at least 80%, at least 85%, at least 86%, at least 87%, at least 88%, at least 89%, at least 90%, at least 91%, at least 92%, at least 93%, at least 94%, at least 95%, at least 96%, at least 97%, at least 98%, at least 99%, or 100% sequence identity to SEQ ID NO 167;
[0055] ss. a polypeptide with catalase activity having at least 80%, at least 85%, at least 86%, at least 87%, at least 88%, at least 89%, at least 90%, at least 91%, at least 92%, at least 93%, at least 94%, at least 95%, at least 96%, at least 97%, at least 98%, at least 99%, or 100% sequence identity to SEQ ID NO 168;
[0056] tt. a polypeptide with catalase activity having at least 80%, at least 85%, at least 86%, at least 87%, at least 88%, at least 89%, at least 90%, at least 91%, at least 92%, at least 93%, at least 94%, at least 95%, at least 96%, at least 97%, at least 98%, at least 99%, or 100% sequence identity to SEQ ID NO 169;
[0057] uu. a polypeptide with catalase activity having at least 80%, at least 85%, at least 86%, at least 87%, at least 88%, at least 89%, at least 90%, at least 91%, at least 92%, at least 93%, at least 94%, at least 95%, at least 96%, at least 97%, at least 98%, at least 99%, or 100% sequence identity to SEQ ID NO 170;
[0058] vv. a polypeptide with catalase activity having at least 80%, at least 85%, at least 86%, at least 87%, at least 88%, at least 89%, at least 90%, at least 91%, at least 92%, at least 93%, at least 94%, at least 95%, at least 96%, at least 97%, at least 98%, at least 99%, or 100% sequence identity to SEQ ID NO 171;
[0059] ww. a polypeptide with catalase activity having at least 80%, at least 85%, at least 86%, at least 87%, at least 88%, at least 89%, at least 90%, at least 91%, at least 92%, at least 93%, at least 94%, at least 95%, at least 96%, at least 97%, at least 98%, at least 99%, or 100% sequence identity to SEQ ID NO 172;
[0060] xx. a polypeptide with catalase activity having at least 80%, at least 85%, at least 86%, at least 87%, at least 88%, at least 89%, at least 90%, at least 91%, at least 92%, at least 93%, at least 94%, at least 95%, at least 96%, at least 97%, at least 98%, at least 99%, or 100% sequence identity to SEQ ID NO 173;
[0061] yy. a polypeptide with catalase activity having at least 80%, at least 85%, at least 86%, at least 87%, at least 88%, at least 89%, at least 90%, at least 91%, at least 92%, at least 93%, at least 94%, at least 95%, at least 96%, at least 97%, at least 98%, at least 99%, or 100% sequence identity to SEQ ID NO 174; and
[0062] zz. a polypeptide with catalase activity having at least 80%, at least 85%, at least 86%, at least 87%, at least 88%, at least 89%, at least 90%, at least 91%, at least 92%, at least 93%, at least 94%, at least 95%, at least 96%, at least 97%, at least 98%, at least 99%, or 100% sequence identity to SEQ ID NO 251.

[0063] In embodiments wherein the animal feed additive or animal feed further comprises a superoxide dismutase of fungal origin, the polypeptide of fungal origin having superoxide dismutase activity is typically selected from the group consisting of:
[0064] a. a polypeptide having at least 75%, at least 80%, at least 85%, at least 86%, at least 87%, at least 88%, at least 89%, at least 90%, at least 91%, at least 92%, at least 93%, at least 94%, at least 95%, at least 96%, at least 97%, at least 98%, at least 99%, or 100% sequence identity to SEQ ID NO: 1;
[0065] b. a polypeptide having at least 75%, at least 80%, at least 85%, at least 86%, at least 87%, at least 88%, at least 89%, at least 90%, at least 91%, at least 92%, at least 93%, at least 94%, at least 95%, at least 96%, at least 97%, at least 98%, at least 99%, or 100% sequence identity to SEQ ID NO: 2;
[0066] c. a polypeptide having at least 75%, at least 80%, at least 85%, at least 86%, at least 87%, at least 88%, at least 89%, at least 90%, at least 91%, at least 92%, at least 93%, at least 94%, at least 95%, at least 96%, at least 97%, at least 98%, at least 99%, or 100% sequence identity to SEQ ID NO: 3;
[0067] d. a polypeptide having at least 75%, at least 80%, at least 85%, at least 86%, at least 87%, at least 88%, at least 89%, at least 90%, at least 91%, at least 92%, at least 93%, at least 94%, at least 95%, at least 96%, at least 97%, at least 98%, at least 99%, or 100% sequence identity to SEQ ID NO: 4;
[0068] e. a polypeptide having at least 75%, at least 80%, at least 85%, at least 86%, at least 87%, at least 88%, at least 89%, at least 90%, at least 91%, at least 92%, at least 93%, at least 94%, at least 95%, at least 96%, at least 97%, at least 98%, at least 99%, or 100% sequence identity to SEQ ID NO: 9;
[0069] f. a polypeptide having at least 75%, at least 80%, at least 85%, at least 86%, at least 87%, at least 88%, at least 89%, at least 90%, at least 91%, at least 92%, at least 93%, at least 94%, at least 95%, at least 96%, at least 97%, at least 98%, at least 99%, or 100% sequence identity to SEQ ID NO: 10;
[0070] g. a polypeptide having at least 75%, at least 80%, at least 85%, at least 86%, at least 87%, at least 88%, at least 89%, at least 90%, at least 91%, at least 92%, at least 93%, at least 94%, at least 95%, at least 96%, at least 97%, at least 98%, at least 99%, or 100% sequence identity to SEQ ID NO: 11;
[0071] h. a polypeptide having at least 75%, at least 80%, at least 85%, at least 86%, at least 87%, at least 88%, at least 89%, at least 90%, at least 91%, at least 92%, at least 93%, at least 94%, at least 95%, at least 96%, at least 97%, at least 98%, at least 99%, or 100% sequence identity to SEQ ID NO: 12;
[0072] i. a polypeptide having at least 75%, at least 80%, at least 85%, at least 86%, at least 87%, at least 88%, at least 89%, at least 90%, at least 91%, at least 92%, at least 93%, at least 94%, at least 95%, at least 96%, at least 97%, at least 98%, at least 99%, or 100% sequence identity to SEQ ID NO: 13;
[0073] j. a polypeptide having at least 75%, at least 80%, at least 85%, at least 86%, at least 87%, at least 88%, at least 89%, at least 90%, at least 91%, at least 92%, at least 93%, at least 94%, at least 95%, at least 96%, at least 97%, at least 98%, at least 99%, or 100% sequence identity to SEQ ID NO: 14;
[0074] k. a polypeptide having at least 75%, at least 80%, at least 85%, at least 86%, at least 87%, at least 88%, at least 89%, at least 90%, at least 91%, at least 92%, at least 93%, at least 94%, at least 95%, at least 96%, at least 97%, at least 98%, at least 99%, or 100% sequence identity to SEQ ID NO: 15;
[0075] l. a polypeptide having at least 75%, at least 80%, at least 85%, at least 86%, at least 87%, at least 88%, at least 89%, at least 90%, at least 91%, at least 92%, at least 93%, at least 94%, at least 95%, at least 96%, at least 97%, at least 98%, at least 99%, or 100% sequence identity to SEQ ID NO: 16;
[0076] m. a polypeptide having at least 75%, at least 80%, at least 85%, at least 86%, at least 87%, at least 88%, at least 89%, at least 90%, at least 91%, at least 92%, at least 93%, at least 94%, at least 95%, at least 96%, at least 97%, at least 98%, at least 99%, or 100% sequence identity to SEQ ID NO: 17;
[0077] n. a polypeptide having at least 75%, at least 80%, at least 85%, at least 86%, at least 87%, at least 88%, at least 89%, at least 90%, at least 91%, at least 92%, at least 93%, at least 94%, at least 95%, at least 96%, at least 97%, at least 98%, at least 99%, or 100% sequence identity to SEQ ID NO: 19;
[0078] o. a polypeptide having at least 75%, at least 80%, at least 85%, at least 86%, at least 87%, at least 88%, at least 89%, at least 90%, at least 91%, at least 92%, at least 93%, at least 94%, at least 95%, at least 96%, at least 97%, at least 98%, at least 99%, or 100% sequence identity to SEQ ID NO: 20;
[0079] p. a polypeptide having at least 75%, at least 80%, at least 85%, at least 86%, at least 87%, at least 88%, at least 89%, at least 90%, at least 91%, at least 92%, at least 93%, at least 94%, at least 95%, at least 96%, at least 97%, at least 98%, at least 99%, or 100% sequence identity to SEQ ID NO: 21;
[0080] q. a polypeptide having at least 75%, at least 80%, at least 85%, at least 86%, at least 87%, at least 88%, at least 89%, at least 90%, at least 91%, at least 92%, at least 93%, at least 94%, at least 95%, at least 96%, at least 97%, at least 98%, at least 99%, or 100% sequence identity to SEQ ID NO: 22;
[0081] r. a polypeptide having at least 75%, at least 80%, at least 85%, at least 86%, at least 87%, at least 88%, at least 89%, at least 90%, at least 91%, at least 92%, at least 93%, at least 94%, at least 95%, at least 96%, at least 97%, at least 98%, at least 99%, or 100% sequence identity to SEQ ID NO: 23;
[0082] s. a polypeptide having at least 75%, at least 80%, at least 85%, at least 86%, at least 87%, at least 88%, at least 89%, at least 90%, at least 91%, at least 92%, at least 93%, at least 94%, at least 95%, at least 96%, at least 97%, at least 98%, at least 99%, or 100% sequence identity to SEQ ID NO: 24;
[0083] t. a polypeptide having at least 75%, at least 80%, at least 85%, at least 86%, at least 87%, at least 88%, at least 89%, at least 90%, at least 91%, at least 92%, at least 93%, at least 94%, at least 95%, at least 96%, at least 97%, at least 98%, at least 99%, or 100% sequence identity to SEQ ID NO: 25;
[0084] u. a polypeptide having at least 75%, at least 80%, at least 85%, at least 86%, at least 87%, at least 88%, at least 89%, at least 90%, at least 91%, at least 92%, at least 93%, at least 94%, at least 95%, at least 96%, at least 97%, at least 98%, at least 99%, or 100% sequence identity to SEQ ID NO: 26;
[0085] v. a polypeptide having at least 75%, at least 80%, at least 85%, at least 86%, at least 87%, at least 88%, at least 89%, at least 90%, at least 91%, at least 92%, at least 93%, at least 94%, at least 95%, at least 96%, at least 97%, at least 98%, at least 99%, or 100% sequence identity to SEQ ID NO: 27;
[0086] w. a polypeptide having at least 75%, at least 80%, at least 85%, at least 86%, at least 87%, at least 88%, at least 89%, at least 90%, at least 91%, at least 92%, at least 93%, at least 94%, at least 95%, at least 96%, at least 97%, at least 98%, at least 99%, or 100% sequence identity to SEQ ID NO: 28;
[0087] x. a polypeptide having at least 75%, at least 80%, at least 85%, at least 86%, at least 87%, at least 88%, at least 89%, at least 90%, at least 91%, at least 92%, at least 93%, at least 94%, at least 95%, at least 96%, at least 97%, at least 98%, at least 99%, or 100% sequence identity to SEQ ID NO: 29;
[0088] y. a polypeptide having at least 75%, at least 80%, at least 85%, at least 86%, at least 87%, at least 88%, at least 89%, at least 90%, at least 91%, at least 92%, at least 93%, at least 94%, at least 95%, at least 96%, at least 97%, at least 98%, at least 99%, or 100% sequence identity to SEQ ID NO: 30;
[0089] z. a polypeptide having at least 75%, at least 80%, at least 85%, at least 86%, at least 87%, at least 88%, at least 89%, at least 90%, at least 91%, at least 92%, at least 93%, at least 94%, at least 95%, at least 96%, at least 97%, at least 98%, at least 99%, or 100% sequence identity to SEQ ID NO: 31;
[0090] aa. a polypeptide having at least 75%, at least 80%, at least 85%, at least 86%, at least 87%, at least 88%, at least 89%, at least 90%, at least 91%, at least 92%, at least 93%, at least 94%, at least 95%, at least 96%, at least 97%, at least 98%, at least 99%, or 100% sequence identity to SEQ ID NO: 32;
[0091] bb. a polypeptide having at least 75%, at least 80%, at least 85%, at least 86%, at least 87%, at least 88%, at least 89%, at least 90%, at least 91%, at least 92%, at least 93%, at least 94%, at least 95%, at least 96%, at least 97%, at least 98%, at least 99%, or 100% sequence identity to SEQ ID NO: 33;
[0092] cc. a polypeptide having at least 75%, at least 80%, at least 85%, at least 86%, at least 87%, at least 88%, at least 89%, at least 90%, at least 91%, at least 92%, at least 93%, at least 94%, at least 95%, at least 96%, at least 97%, at least 98%, at least 99%, or 100% sequence identity to SEQ ID NO: 34;
[0093] dd. a polypeptide having at least 75%, at least 80%, at least 85%, at least 86%, at least 87%, at least 88%, at least 89%, at least 90%, at least 91%, at least 92%, at least 93%, at least 94%, at least 95%, at least 96%, at least 97%, at least 98%, at least 99%, or 100% sequence identity to SEQ ID NO: 36;
[0094] ee. a polypeptide having at least 75%, at least 80%, at least 85%, at least 86%, at least 87%, at least 88%, at least 89%, at least 90%, at least 91%, at least 92%, at least 93%, at least 94%, at least 95%, at least 96%, at least 97%, at least 98%, at least 99%, or 100% sequence identity to SEQ ID NO: 38;
[0095] ff. a polypeptide having at least 75%, at least 80%, at least 85%, at least 86%, at least 87%, at least 88%, at least 89%, at least 90%, at least 91%, at least 92%, at least 93%, at least 94%, at least 95%, at least 96%, at least 97%, at least 98%, at least 99%, or 100% sequence identity to SEQ ID NO: 39;
[0096] gg. a polypeptide having at least 75%, at least 80%, at least 85%, at least 86%, at least 87%, at least 88%, at least 89%, at least 90%, at least 91%, at least 92%, at least 93%, at least 94%, at least 95%, at least 96%, at least 97%, at least 98%, at least 99%, or 100% sequence identity to SEQ ID NO: 40;
[0097] hh. a polypeptide having at least 75%, at least 80%, at least 85%, at least 86%, at least 87%, at least 88%, at least 89%, at least 90%, at least 91%, at least 92%, at least 93%, at least 94%, at least 95%, at least 96%, at least 97%, at least 98%, at least 99%, or 100% sequence identity to SEQ ID NO: 41;
[0098] ii. a polypeptide having at least 75%, at least 80%, at least 85%, at least 86%, at least 87%, at least 88%, at least 89%, at least 90%, at least 91%, at least 92%, at least 93%, at least 94%, at least 95%, at least 96%, at least 97%, at least 98%, at least 99%, or 100% sequence identity to SEQ ID NO: 42;
[0099] jj. a polypeptide having at least 75%, at least 80%, at least 85%, at least 86%, at least 87%, at least 88%, at least 89%, at least 90%, at least 91%, at least 92%, at least 93%, at least 94%, at least 95%, at least 96%, at least 97%, at least 98%, at least 99%, or 100% sequence identity to SEQ ID NO: 43;
[0100] kk. a polypeptide having at least 75%, at least 80%, at least 85%, at least 86%, at least 87%, at least 88%, at least 89%, at least 90%, at least 91%, at least 92%, at least 93%, at least 94%, at least 95%, at least 96%, at least 97%, at least 98%, at least 99%, or 100% sequence identity to SEQ ID NO: 44;
[0101] ll. a polypeptide having at least 75%, at least 80%, at least 85%, at least 86%, at least 87%, at least 88%, at least 89%, at least 90%, at least 91%, at least 92%, at least 93%, at least 94%, at least 95%, at least 96%, at least 97%, at least 98%, at least 99%, or 100% sequence identity to SEQ ID NO: 45;
[0102] mm. a polypeptide having at least 75%, at least 80%, at least 85%, at least 86%, at least 87%, at least 88%, at least 89%, at least 90%, at least 91%, at least 92%, at least 93%, at least 94%, at least 95%, at least 96%, at least 97%, at least 98%, at least 99%, or 100% sequence identity to SEQ ID NO: 46;
[0103] nn. a polypeptide having at least 75%, at least 80%, at least 85%, at least 86%, at least 87%, at least 88%, at least 89%, at least 90%, at least 91%, at least 92%, at least 93%, at least 94%, at least 95%, at least 96%, at least 97%, at least 98%, at least 99%, or 100% sequence identity to SEQ ID NO: 47; and
[0104] oo. a polypeptide having at least 75%, at least 80%, at least 85%, at least 86%, at least 87%, at least 88%, at least 89%, at least 90%, at least 91%, at least 92%, at least 93%, at least 94%, at least 95%, at least 96%, at least 97%, at least 98%, at least 99%, or 100% sequence identity to SEQ ID NO: 48;
[0105] pp. a polypeptide having at least 75%, at least 80%, at least 85%, at least 86%, at least 87%, at least 88%, at least 89%, at least 90%, at least 91%, at least 92%, at least 93%, at least 94%, at least 95%, at least 96%, at least 97%, at least 98%, at least 99%, or 100% sequence identity to SEQ ID NO:199;
[0106] qq. a polypeptide having at least 75%, at least 80%, at least 85%, at least 86%, at least 87%, at least 88%, at least 89%, at least 90%, at least 91%, at least 92%, at least 93%, at least 94%, at least 95%, at least 96%, at least 97%, at least 98%, at least 99%, or 100% sequence identity to SEQ ID NO:200;
[0107] rr. a polypeptide having at least 75%, at least 80%, at least 85%, at least 86%, at least 87%, at least 88%, at least 89%, at least 90%, at least 91%, at least 92%, at least 93%, at least 94%, at least 95%, at least 96%, at least 97%, at least 98%, at least 99%, or 100% sequence identity to SEQ ID NO 201;
[0108] ss. a polypeptide having at least 75%, at least 80%, at least 85%, at least 86%, at least 87%, at least 88%, at least 89%, at least 90%, at least 91%, at least 92%, at least 93%, at least 94%, at least 95%, at least 96%, at least 97%, at least 98%, at least 99%, or 100% sequence identity to SEQ ID NO:202;
[0109] tt. a polypeptide having at least 75%, at least 80%, at least 85%, at least 86%, at least 87%, at least 88%, at least 89%, at least 90%, at least 91%, at least 92%, at least 93%, at least 94%, at least 95%, at least 96%, at least 97%, at least 98%, at least 99%, or 100% sequence identity to SEQ ID NO:203;
[0110] uu. a polypeptide having at least 75%, at least 80%, at least 85%, at least 86%, at least 87%, at least 88%, at least 89%, at least 90%, at least 91%, at least 92%, at least 93%, at least 94%, at least 95%, at least 96%, at least 97%, at least 98%, at least 99%, or 100% sequence identity to SEQ ID NO:204;
[0111] vv. a polypeptide having at least 75%, at least 80%, at least 85%, at least 86%, at least 87%, at least 88%, at least 89%, at least 90%, at least 91%, at least 92%, at least 93%, at least 94%, at least 95%, at least 96%, at least 97%, at least 98%, at least 99%, or 100% sequence identity to SEQ ID NO: 205;
[0112] ww. a polypeptide having at least 75%, at least 80%, at least 85%, at least 86%, at least 87%, at least 88%, at least 89%, at least 90%, at least 91%, at least 92%, at least 93%, at least 94%, at least 95%, at least 96%, at least 97%, at least 98%, at least 99%, or 100% sequence identity to SEQ ID NO:206;
[0113] xx. a polypeptide having at least 75%, at least 80%, at least 85%, at least 86%, at least 87%, at least 88%, at least 89%, at least 90%, at least 91%, at least 92%, at least 93%, at least 94%, at least 95%, at least 96%, at least 97%, at least 98%, at least 99%, or 100% sequence identity to SEQ ID NO:207;
[0114] yy. a polypeptide having at least 75%, at least 80%, at least 85%, at least 86%, at least 87%, at least 88%, at least 89%, at least 90%, at least 91%, at least 92%, at least 93%, at least 94%, at least 95%, at least 96%, at least 97%, at least 98%, at least 99%, or 100% sequence identity to SEQ ID NO:208;
[0115] zz. a polypeptide having at least 75%, at least 80%, at least 85%, at least 86%, at least 87%, at least 88%, at least 89%, at least 90%, at least 91%, at least 92%, at least 93%, at least 94%, at least 95%, at least 96%, at least 97%, at least 98%, at least 99%, or 100% sequence identity to SEQ ID NO:209;
[0116] aaa. a polypeptide having at least 75%, at least 80%, at least 85%, at least 86%, at least 87%, at least 88%, at least 89%, at least 90%, at least 91%, at least 92%, at least 93%, at least 94%, at least 95%, at least 96%, at least 97%, at least 98%, at least 99%, or 100% sequence identity to SEQ ID NO:232;
[0117] bbb. a polypeptide having at least 75%, at least 80%, at least 85%, at least 86%, at least 87%, at least 88%, at least 89%, at least 90%, at least 91%, at least 92%, at least 93%, at least 94%, at least 95%, at least 96%, at least 97%, at least 98%, at least 99%, or 100% sequence identity to SEQ ID NO:233;
[0118] ccc. a polypeptide having at least 75%, at least 80%, at least 85%, at least 86%, at least 87%, at least 88%, at least 89%, at least 90%, at least 91%, at least 92%, at least 93%, at least 94%, at least 95%, at least 96%, at least 97%, at least 98%, at least 99%, or 100% sequence identity to SEQ ID NO:234;
[0119] ddd. a polypeptide having at least 75%, at least 80%, at least 85%, at least 86%, at least 87%, at least 88%, at least 89%, at least 90%, at least 91%, at least 92%, at least 93%, at least 94%, at least 95%, at least 96%, at least 97%, at least 98%, at least 99%, or 100% sequence identity to SEQ ID NO:235;
[0120] eee. a polypeptide having at least 75%, at least 80%, at least 85%, at least 86%, at least 87%, at least 88%, at least 89%, at least 90%, at least 91%, at least 92%, at least 93%, at least 94%, at least 95%, at least 96%, at least 97%, at least 98%, at least 99%, or 100% sequence identity to SEQ ID NO:236; and
[0121] fff. a polypeptide having at least 75%, at least 80%, at least 85%, at least 86%, at least 87%, at least 88%, at least 89%, at least 90%, at least 91%, at least 92%, at least 93%, at least 94%, at least 95%, at least 96%, at least 97%, at least 98%, at least 99%, or 100% sequence identity to SEQ ID NO:237.

[0122] A further aspect of the invention is directed to a method of improving one or more performance parameters in an animal comprising administering an animal feed comprising the animal feed additive as defined by the invention, or administering the animal feed additive as defined by the invention, wherein the one or more performance parameters is selected from the group consisting of the European Production Efficiency Factor (EPEF), Feed Conversion Ratio (FCR), Growth Rate (GR), Body Weight Gain (WG), Mortality Rate (MR) and Flock Uniformity (FU).

[0123] A further aspect of the invention is directed to a method of improving or enhancing immune response and/or reducing inflammation and/or for the modulation of the gut flora in an animal comprising administering to the animal an animal feed comprising the animal feed, or administering the animal feed additive said animal feed additive defined herein.

[0124] An exciting aspect of the invention is directed to a method of reducing or eliminating the use of antibiotics administered to an animal feed, comprising administering to the animal an animal feed comprising the animal feed additive or administering the animal feed additive, said animal feed or animal feed additive as defined herein.

[0125] As shown by the Examples, the method if the invention using the the animal feed addtitive of the invention is particularly preferred in embodiment on an animal that has experienced or is anticipated to experience heat stress, cold stress, nutritional stress and/or oxidative stress.

[0126] A further aspect of the invention is directed to the use of an animal feed additive as defined by the invention as antioxidant, preferably in feed and feed premixes.

[0127] A further aspect of the invention is directed to the use of an animal feed additive as defined by the invention for replacing or partially replacing antibiotics in animal feed.

[0128] A further aspect of the invention is directed to an animal feed comprising one or more protein sources and one or more energy sources characterised in that the animal feed comprises an animal feed additive is as defined by the present invention.

[0129] An aspect of the invention is directed to an animal feed additive as defined by the present invention which
[0130] a. improves or enhances immune response; or
[0131] b. reduces inflammation;
[0132] when fed to the animal as compared to animals fed a feed composition without the polypeptides.

[0133] An aspect of the invention is directed to novel polypeptides having catalase activity, namely to an isolated polypeptide having catalase activity is selected from the group consisting of:
[0134] a. a polypeptide having at least 80%, at least 85%, at least 86%, at least 87%, at least 88%, at least 89%, at least 90%, at least 91%, at least 92%, at least 93%, at least 94%, at least 95%, at least 96%, at least 97%, at least 98%, at least 99%, or 100% sequence identity to SEQ ID NO: 6; and
[0135] b. a polypeptide having at least 80%, at least 85%, at least 86%, at least 87%, at least 88%, at least 89%, at least 90%, at least 91%, at least 92%, at least 93%, at least 94%, at least 95%, at least 96%, at least 97%, at least 98%, at least 99%, or 100% sequence identity to SEQ ID NO: 7;
[0136] c. a polypeptide having at least 80%, at least 85%, at least 86%, at least 87%, at least 88%, at least 89%, at least 90%, at least 91%, at least 92%, at least 93%, at least 94%, at least 95%, at least 96%, at least 97%, at least 98%, at least 99%, or 100% sequence identity to SEQ ID NO: 103;
[0137] d. a polypeptide having at least 80%, at least 85%, at least 86%, at least 87%, at least 88%, at least 89%, at least 90%, at least 91%, at least 92%, at least 93%, at least 94%, at least 95%, at least 96%, at least 97%, at least 98%, at least 99%, or 100% sequence identity to SEQ ID NO: 104;
[0138] e. a polypeptide having at least 80%, at least 85%, at least 86%, at least 87%, at least 88%, at least 89%, at least 90%, at least 91%, at least 92%, at least 93%, at least 94%, at least 95%, at least 96%, at least 97%, at least 98%, at least 99%, or 100% sequence identity to SEQ ID NO: 105;
[0139] f. a polypeptide having at least 80%, at least 85%, at least 86%, at least 87%, at least 88%, at least 89%, at least 90%, at least 91%, at least 92%, at least 93%, at least 94%, at least 95%, at least 96%, at least 97%, at least 98%, at least 99%, or 100% sequence identity to SEQ ID NO: 106;
[0140] g. a polypeptide having at least 80%, at least 85%, at least 86%, at least 87%, at least 88%, at least 89%, at least 90%, at least 91%, at least 92%, at least 93%, at least 94%, at least 95%, at least 96%, at least 97%, at least 98%, at least 99%, or 100% sequence identity to SEQ ID NO: 107;
[0141] h. a polypeptide having at least 80%, at least 85%, at least 86%, at least 87%, at least 88%, at least 89%, at least 90%, at least 91%, at least 92%, at least 93%, at least 94%, at least 95%, at least 96%, at least 97%, at least 98%, at least 99%, or 100% sequence identity to SEQ ID NO: 108;
[0142] i. a polypeptide having at least 80%, at least 85%, at least 86%, at least 87%, at least 88%, at least 89%, at least 90%, at least 91%, at least 92%, at least 93%, at least 94%, at least 95%, at least 96%, at least 97%, at least 98%, at least 99%, or 100% sequence identity to SEQ ID NO: 109;
[0143] j. a polypeptide having at least 80%, at least 85%, at least 86%, at least 87%, at least 88%, at least 89%, at least 90%, at least 91%, at least 92%, at least 93%, at least 94%, at least 95%, at least 96%, at least 97%, at least 98%, at least 99%, or 100% sequence identity to SEQ ID NO: 110;
[0144] k. a polypeptide having at least 80%, at least 85%, at least 86%, at least 87%, at least 88%, at least 89%, at least 90%, at least 91%, at least 92%, at least 93%, at least 94%, at least 95%, at least 96%, at least 97%, at least 98%, at least 99%, or 100% sequence identity to SEQ ID NO: 111;
[0145] l. a polypeptide having at least 80%, at least 85%, at least 86%, at least 87%, at least 88%, at least 89%, at least 90%, at least 91%, at least 92%, at least 93%, at least 94%, at least 95%, at least 96%, at least 97%, at least 98%, at least 99%, or 100% sequence identity to SEQ ID NO: 112;
[0146] m. a polypeptide having at least 80%, at least 85%, at least 86%, at least 87%, at least 88%, at least 89%, at least 90%, at least 91%, at least 92%, at least 93%, at least 94%, at least 95%, at least 96%, at least 97%, at least 98%, at least 99%, or 100% sequence identity to SEQ ID NO: 113;
[0147] n. a polypeptide having at least 80%, at least 85%, at least 86%, at least 87%, at least 88%, at least 89%, at least 90%, at least 91%, at least 92%, at least 93%, at least 94%, at least 95%, at least 96%, at least 97%, at least 98%, at least 99%, or 100% sequence identity to SEQ ID NO: 114;
[0148] o. a polypeptide having at least 80%, at least 85%, at least 86%, at least 87%, at least 88%, at least 89%, at least 90%, at least 91%, at least 92%, at least 93%, at least 94%, at least 95%, at least 96%, at least 97%, at least 98%, at least 99%, or 100% sequence identity to SEQ ID NO: 115;
[0149] p. a polypeptide having at least 80%, at least 85%, at least 86%, at least 87%, at least 88%, at least 89%, at least 90%, at least 91%, at least 92%, at least 93%, at least 94%, at least 95%, at least 96%, at least 97%, at least 98%, at least 99%, or 100% sequence identity to SEQ ID NO: 116;
[0150] q. a polypeptide having at least 80%, at least 85%, at least 86%, at least 87%, at least 88%, at least 89%, at least 90%, at least 91%, at least 92%, at least 93%, at least 94%, at least 95%, at least 96%, at least 97%, at least 98%, at least 99%, or 100% sequence identity to SEQ ID NO: 117;
[0151] r. a polypeptide having at least 80%, at least 85%, at least 86%, at least 87%, at least 88%, at least 89%, at least 90%, at least 91%, at least 92%, at least 93%, at least 94%, at least 95%, at least 96%, at least 97%, at least 98%, at least 99%, or 100% sequence identity to SEQ ID NO: 118;
[0152] s. a polypeptide having at least 80%, at least 85%, at least 86%, at least 87%, at least 88%, at least 89%, at least 90%, at least 91%, at least 92%, at least 93%, at least 94%, at least 95%, at least 96%, at least 97%, at least 98%, at least 99%, or 100% sequence identity to SEQ ID NO: 119;
[0153] t. a polypeptide having at least 80%, at least 85%, at least 86%, at least 87%, at least 88%, at least 89%, at least 90%, at least 91%, at least 92%, at least 93%, at least 94%, at least 95%, at least 96%, at least 97%, at least 98%, at least 99%, or 100% sequence identity to SEQ ID NO: 120;
[0154] u. a polypeptide having at least 80%, at least 85%, at least 86%, at least 87%, at least 88%, at least 89%, at least 90%, at least 91%, at least 92%, at least 93%, at least 94%, at least 95%, at least 96%, at least 97%, at least 98%, at least 99%, or 100% sequence identity to SEQ ID NO: 121;
[0155] v. a polypeptide having at least 80%, at least 85%, at least 86%, at least 87%, at least 88%, at least 89%, at least 90%, at least 91%, at least 92%, at least 93%, at least 94%, at least 95%, at least 96%, at least 97%, at least 98%, at least 99%, or 100% sequence identity to SEQ ID NO: 122;
[0156] w. a polypeptide having at least 80%, at least 85%, at least 86%, at least 87%, at least 88%, at least 89%, at least 90%, at least 91%, at least 92%, at least 93%, at least 94%, at least 95%, at least 96%, at least 97%, at least 98%, at least 99%, or 100% sequence identity to SEQ ID NO: 123;
[0157] x. a polypeptide having at least 80%, at least 85%, at least 86%, at least 87%, at least 88%, at least 89%, at least 90%, at least 91%, at least 92%, at least 93%, at least 94%, at least 95%, at least 96%, at least 97%, at least 98%, at least 99%, or 100% sequence identity to SEQ ID NO: 124;
[0158] y. a polypeptide having at least 80%, at least 85%, at least 86%, at least 87%, at least 88%, at least 89%, at least 90%, at least 91%, at least 92%, at least 93%, at least 94%, at least 95%, at least 96%, at least 97%, at least 98%, at least 99%, or 100% sequence identity to SEQ ID NO: 125;
[0159] z. a polypeptide having at least 80%, at least 85%, at least 86%, at least 87%, at least 88%, at least 89%, at least 90%, at least 91%, at least 92%, at least 93%, at least 94%, at least 95%, at least 96%, at least 97%, at least 98%, at least 99%, or 100% sequence identity to SEQ ID NO: 126; and
[0160] aa. a polypeptide having at least 80%, at least 85%, at least 86%, at least 87%, at least 88%, at least 89%, at least 90%, at least 91%, at least 92%, at least 93%, at least 94%, at least 95%, at least 96%, at least 97%, at least 98%, at least 99%, or 100% sequence identity to SEQ ID NO: 127.

[0161] The invention also relates to a method of
[0162] improving one or more performance parameters in an animal comprising administering to the animal an animal feed or animal feed additive comprising one or more polypeptides having catalase activity, wherein the one or more performance parameters is selected from the group consisting of the European Production Efficiency Factor (EPEF), Feed Conversion Ratio (FCR), Growth Rate (GR), Body Weight Gain (WG), Mortality Rate (MR) and Flock Uniformity (FU).
[0163] improving or enhancing immune response and/or reducing inflammation and/or for the modulation of the gut flora in an animal comprising administering to the animal an animal feed or animal feed additive comprising one or more polypeptides having catalase activity.
[0164] reducing or eliminating the use of antibiotics administered to animal feed, comprising administering to the animal an animal feed or animal feed additive comprising of one or more polypeptides having catalase activity.

[0165] A further aspect of the invention is directed to the prophylactic care or management, reduction or prevention of oxidative stress in a monogastric animal comprising administrating to said animal a polypeptide having catalase activity and optionally a polypeptide having superoxide dismutase activity. Oxidative stress is a disturbance between antioxidant/oxidant status in favor of excessive generation, or slower removal of free radicals, such as reactive oxygen species (ROS). Excessive ROS content leads to damage of proteins, lipids and nucleic acids, with consequent loss of their biological functions and subsequent tissue injury. Oxidative stress has been linked to initiation and progression of several infectious diseases. Accordingly, a further aspect of the invention is the prophylactic care or management of infectious diseases in monogastric animal comprising administrating to said animal a polypeptide having catalase activity and optionally a polypeptide having superoxide dismutase activity. The administration is typically by means of feeding said animal an feed additive comprising an enzyme component, wherein the enzyme component comprises all of the enzymes of the additive and consists of a polypeptide having catalase activity and optionally a polypeptide having superoxide dismutase activity.

[0166] The invention is further directed to an animal feed comprising one or more protein sources and one or more energy sources characterised in that the animal feed further comprises one or more polypeptides having catalase activity and optionally one or more polypeptides having superoxide dismutase (SOD) activity, wherein the animal feed
[0167] a. reduces FCR by between 1 to 10%; or
[0168] b. increases average daily WG by between 1 to 10%; or
[0169] c. increases average daily feed intake by between 1 to 10%; or
[0170] d. any combinations of a.-c.;
[0171] when fed to the animal as compared to animals fed a feed composition without the polypeptides.

### BRIEF DESCRIPTION OF THE FIGURES

[0172] FIG. 1: illustrates the body weight gain (BWG) in poultry from days 0-35. The graphs illustrate the negative impact of heat stress on BWG. In the non-heat stressed animals, the effect of the SOD/CAT combination outperformed or equaled the positive control (Vit E/Se). In heat stressed animals, both the Vit E/Se positive control and the SOD/CAT combination improved BWG.

[0173] FIG. 2: illustrates the Conversion Ratio (FCR) in poultry from days 0-35. The graphs illustrate the negative impact (increase) of heat stress on Feed Conversion Ratio (FCR). In the non-heat stressed animals, the effect of the SOD/CAT combination equaled the positive control (Vit E/Se).

[0174] FIG. 3: illustrates the Mortality in poultry from days 0-35. The graphs illustrate the negative impact (increase) of heat stress on Mortality. In heat stressed animals, both the Vit E/Se positive control and the SOD/CAT combination reduced Mortality.

[0175] FIG. 4: illustrates the body weight gain (BWG) from days 27-35. The graphs illustrate the negative impact of heat stress on BWG. In the non-heat stressed animals, the effect of the SOD/CAT combination outperformed or equaled the positive control (Vit E/Se).

[0176] FIG. 5: illustrates the Conversion Ratio (FCR) from days 27-35. The graphs illustrate the negative impact (increase) of heat stress on Feed Conversion Ratio (FCR). In the non-heat stressed animals, the effect of the SOD/CAT combination equaled the positive control (Vit E/Se).

[0177] FIG. 6: illustrates the Mortality from days 27-35. The graphs illustrate the negative impact (increase) of heat stress on Mortality. In heat stressed animals, both the Vit E/Se positive control and the SOD/CAT combination reduced Mortality.

[0178] FIG. 7: illustrates the body weight gain (BWG) from days 0-7. In heat stressed animals, both the Vit E/Se positive control and the SOD/CAT combination improved BWG.

[0179] FIG. 8: illustrates the Conversion Ratio (FCR) from days 0-7. In heat-stressed animals, the effect of the SOD/CAT combination equaled the positive control (Vit E/Se). In heat stressed animals, both the Vit E/Se positive control and the SOD/CAT combination improved (reduced) FCR.

[0180] FIG. 9: illustrates that SOD and CAT is associated with an increase in the expression of liver GPx (pre-heat stress) protein (d 27).

[0181] FIG. 10: illustrates that SOD and CAT is associated with a reduction in the expression of Heat Shock Protein HSP70 in the jejunum (d28) The reduction in Heat Shock Protein is indicative of reduced inflammation.

[0182] FIG. 11: illustrates that SOD and CAT is associated with a reduction in the expression of Heat Shock Protein HSP70 in the liver (d35). The reduction in Heat Shock Protein is indicative of reduced inflammation.

[0183] FIG. 12: illustrates that SOD and CAT is associated with a reduction in the expression of liver iNOS prior to heat stress challenge (d27). Liver iNOS is a mediator of inflammation.

[0184] FIG. 13: illustrates that SOD and CAT is associated with a reduction in the expression of liver IL-10 during heat stress (d 35), which qualifies as inflammatory marker.

[0185] FIG. 14: illustrates that SOD and CAT is associated with a reduction in the expression of liver TNF alpha during heat stress (d 35), which qualifies as inflammatory marker.

[0186] FIG. 15: illustrates that SOD and CAT is associated with a reduction in the expression of liver INF gamma during heat stress (d 35), which qualifies as inflammatory marker.

[0187] FIG. 16: shows the basal diet for the piglets of the study

[0188] FIG. 17: illustrates the Conversion Ratio (FCR) in piglets from days 0-42. There was significant difference observed in growth performance between positive and negative control. Catalase alone significantly improved the FCR. SOD alone significantly improved the FCR. The combination of the SOD and Catalase allowed for lower FCR or equally low FCR at lower doses. Combining SOD & CAT or feeding CAT and SOD alone gave similar performance to the antibiotic treatment and significantly better than NC.

[0189] FIG. 18: illustrates the body weight gain (BWG) in a second piglet trail from days 0-42. There was significant difference observed in growth performance between positive and negative control.

[0190] FIG. 19: illustrates the Conversion Ratio (FCR) in the piglets of the second piglet trail from over the period of d0-d42. In particular, inclusion of SOD+CAT (independently of the candidate B or C) showed significant improvement on FCR performance.

### OVERVIEW OF SEQUENCE LISTING

[0191] SEQ ID NO 1 is the amino acid sequence of a mature polypeptide having superoxide dismutase (SOD) activity from Trichoderman reesei comprising 287 amino acid residues.

[0192] SEQ ID NO 2 is the amino acid sequence of a mature polypeptide having superoxide dismutase (SOD) activity from Aspergillus versicolor comprising 186 amino acid residues.

[0193] SEQ ID NO 3 is the amino acid sequence of a mature polypeptide having superoxide dismutase (SOD) activity from Aspergillus deflectus comprising 138 amino acid residues.

[0194] SEQ ID NO 4 is the amino acid sequence of a mature polypeptide having superoxide dismutase (SOD) activity from Aspergillus egyptiacus comprising 188 amino acid residues wherein residues 1 to 19 make up the signal peptide and residues 47 to 179 make up the SOD.

[0195] SEQ ID NO 5 is a polypeptide coding sequence of the polypeptide of SEQ ID NO: 1.

[0196] SEQ ID NO 6 is the amino acid sequence of a mature polypeptide having catalase activity from Aspergillus niger comprising 714 amino acid residues.

[0197] SEQ ID NO 7 is the amino acid sequence of a mature polypeptide having catalase activity from Aspergillus niger comprising 730 amino acid residues. SEQ ID NO 7 is sold under the tradename Catazyme™

[0198] SEQ ID NO 8 is a polypeptide coding sequence from Aspergillus niger of the polypeptide of SEQ ID NO: 7.

[0199] SEQ ID NO 9 is the amino acid sequence of a mature polypeptide having superoxide dismutase (SOD) activity available from Westerdykella sp. AS85-2.

[0200] SEQ ID NO 10 is the amino acid sequence of a mature polypeptide having superoxide dismutase (SOD) activity available from Aspergillus sp. XZ2669.

[0201] SEQ ID NO 11 is the amino acid sequence of a mature polypeptide having superoxide dismutase (SOD) activity from Preussia terricola.

[0202] SEQ ID NO 12 is the amino acid sequence of a mature polypeptide having superoxide dismutase (SOD) activity available from Kionochaeta sp.

[0203] SEQ ID NO 13 is the amino acid sequence of a mature polypeptide having superoxide dismutase (SOD) activity available from Kioochaeta sp.

[0204] SEQ ID NO 14 is the amino acid sequence of a mature polypeptide having superoxide dismutase (SOD) activity available from Metapochonia bulbillosa.

[0205] SEQ ID NO 15 is the amino acid sequence of a mature polypeptide having superoxide dismutase (SOD) activity available from Xylomelasma sp. XZ0718.

[0206] SEQ ID NO 16 is the amino acid sequence of a mature polypeptide having superoxide dismutase (SOD) activity available from Preussia flanaganii.

[0207] SEQ ID NO 17 is the amino acid sequence of a mature polypeptide having superoxide dismutase (SOD) activity) available from Cladobotryum sp.

[0208] SEQ ID NO 18 is a full-length amino acid sequence from the is the cDNA sequence of SEQ ID NO 98 from Cladobotryum sp. The signal start is amino acid residue 1 and the signal stop is amino acid residue 22.

[0209] SEQ ID NO 19 is the amino acid sequence of a mature polypeptide having superoxide dismutase (SOD) activity available from Westerdykella sp-46156.

[0210] SEQ ID NO 20 is the amino acid sequence of a mature polypeptide having superoxide dismutase (SOD) activity available from Trichoderma hamatum.

[0211] SEQ ID NO 21 is the amino acid sequence of a mature polypeptide having superoxide dismutase (SOD) activity available from Mycothermus thermophilus.

[0212] SEQ ID NO 22 is the amino acid sequence of a mature polypeptide having superoxide dismutase (SOD) activity available from Cephalotrichiella penicillate.

[0213] SEQ ID NO 23 is the amino acid sequence of a mature polypeptide having superoxide dismutase (SOD) activity available from Chaetomium megalocarpum.

[0214] SEQ ID NO 24 is the amino acid sequence of a mature polypeptide having superoxide dismutase (SOD) activity available from Chaetomium thermophilum var. thermophilum.

[0215] SEQ ID NO 25 is the amino acid sequence of a mature polypeptide having superoxide dismutase (SOD) activity available from Humicola hyalothermophila.

[0216] SEQ ID NO 26 is the amino acid sequence of a mature polypeptide having superoxide dismutase (SOD) activity available from Subramaniula anamorphosa.

[0217] SEQ ID NO 27 is the amino acid sequence of a mature polypeptide having superoxide dismutase (SOD) activity available from Sphingobacterium sp. T2.

[0218] SEQ ID NO 28 is the amino acid sequence of a mature polypeptide having superoxide dismutase (SOD) activity available from Trichoderma rossicum.

[0219] SEQ ID NO 29 is the amino acid sequence of a mature polypeptide having superoxide dismutase (SOD) activity available from Trichoderma lixii.

[0220] SEQ ID NO 30 is the amino acid sequence of a mature polypeptide having superoxide dismutase (SOD) activity available from Trichoderma sp-54723.

[0221] SEQ ID NO 31 is the amino acid sequence of a mature polypeptide having superoxide dismutase (SOD) activity available from Aspergillus niveus.

[0222] SEQ ID NO 32 is the amino acid sequence of a mature polypeptide having superoxide dismutase (SOD) activity available from Aspergillus templicola.

[0223] SEQ ID NO 33 is the amino acid sequence of a mature polypeptide having superoxide dismutase (SOD) activity available from Pochonia chlamydosporia var. spinulospora.

[0224] SEQ ID NO 34 is the amino acid sequence of a mature polypeptide having superoxide dismutase (SOD) activity available from Trichoderma sp-44174.

[0225] SEQ ID NO 35 is a full-length amino acid sequence from the is the cDNA sequence of SEQ ID NO 138 from Trichoderma sp-44174. The signal start is amino acid residue 1 and the signal stop is amino acid residue 19.

[0226] SEQ ID NO 36 is the amino acid sequence of a mature polypeptide having superoxide dismutase (SOD) activity available from Trichoderma rossicum.

[0227] SEQ ID NO 37 is a full-length amino acid sequence from the cDNA sequence of SEQ ID NO 139 from Trichoderma rossicum. The signal start is amino acid residue 1 and the signal stop is amino acid residue 19.

[0228] SEQ ID NO 38 is the amino acid sequence of a mature polypeptide having superoxide dismutase (SOD) activity available from Trichoderma sp-54723.

[0229] SEQ ID NO 39 is the amino acid sequence of a mature polypeptide having superoxide dismutase (SOD) activity available from Trichoderma sp-44174.

[0230] SEQ ID NO 40 is the amino acid sequence of a mature polypeptide having superoxide dismutase (SOD) activity available from Metapochonia suchlasporia.

[0231] SEQ ID NO 41 is the amino acid sequence of a mature polypeptide having superoxide dismutase (SOD) activity available from Metarhizium marquandii.

[0232] SEQ ID NO 42 is the amino acid sequence of a mature polypeptide having superoxide dismutase (SOD) activity available from Diaporthe nobilis.

[0233] SEQ ID NO 43 is the amino acid sequence of a mature polypeptide having superoxide dismutase (SOD) activity available from Tolypocladium sp. XZ2627.

[0234] SEQ ID NO 44 is the amino acid sequence of a mature polypeptide having superoxide dismutase (SOD) activity available from Aspergillus japonicus.

[0235] SEQ ID NO 45 is the amino acid sequence of a mature polypeptide having superoxide dismutase (SOD) activity available from Metarhizium sp. XZ2431.

[0236] SEQ ID NO 46 is the amino acid sequence of a mature polypeptide having superoxide dismutase (SOD) activity available from Armillaria ostoyae.

[0237] SEQ ID NO 47 is the amino acid sequence of a mature polypeptide having superoxide dismutase (SOD) activity available from Trichoderma spirale.

[0238] SEQ ID NO 48 is the amino acid sequence of a mature polypeptide having superoxide dismutase (SOD) activity available from Aspergillus elegans.

[0239] SEQ ID NO 49 is a full-length amino acid sequence from the cDNA sequence of SEQ ID NO 90 from Westerdykella sp. AS85-2. The signal start is amino acid residue 1 and the signal stop is amino acid residue 18.

[0240] SEQ ID NO 50 is a full-length amino acid sequence from the cDNA sequence of SEQ ID NO 91 from Aspergillus sp. XZ2669. The signal start is amino acid residue 1 and the signal stop is amino acid residue 19.

[0241] SEQ ID NO 51 is a full-length amino acid sequence from the cDNA sequence of SEQ ID NO 92 from Preussia terricola. The signal start is amino acid residue 1 and the signal stop is amino acid residue 19.

[0242] SEQ ID NO 52 is a full-length amino acid sequence from the is the cDNA sequence of SEQ ID NO 93 from Kioochaeta sp. The signal start is amino acid residue 1 and the signal stop is amino acid residue 18.

[0243] SEQID NO 53 is a full-length amino acid sequence from the cDNA sequence of SEQ ID NO 94 from Kioochaeta sp. The signal start is amino acid residue 1 and the signal stop is amino acid residue 18.

[0244] SEQ ID NO 54 is a full-length amino acid sequence from the cDNA sequence of SEQ ID NO 95 from Metapochonia bulbillosa. The signal start is amino acid residue 1 and the signal stop is amino acid residue 17.

[0245] SEQ ID NO 55 is a full-length amino acid sequence from the cDNA sequence of SEQ ID NO 96 from Xylomelasma sp. XZ0718. The signal start is amino acid residue 1 and the signal stop is amino acid residue 18.

[0246] SEQ ID NO 56 is a full-length amino acid sequence from the cDNA sequence of SEQ ID NO 97 from Preussia flanaganii. The signal start is amino acid residue 1 and the signal stop is amino acid residue 25.

[0247] SEQ ID NO 57 is a full-length amino acid sequence from the cDNA sequence of SEQ ID NO 99 from Westerdykella sp-46156. The signal start is amino acid residue 1 and the signal stop is amino acid residue 18.

[0248] SEQ ID NO 58 is a full-length amino acid sequence from the cDNA sequence of

[0249] SEQ ID NO 100 from Trichoderma hamatum. The signal start is amino acid residue 1 and the signal stop is amino acid residue 20.

[0250] SEQ ID NO 59 is a full-length amino acid sequence from the cDNA sequence of SEQ ID NO 101 from Mycothermus thermophilus.

[0251] SEQ ID NO 60 is a full-length amino acid sequence from the cDNA sequence of SEQ ID NO 102 from Cephalotrichiella penicillate. The signal start is amino acid residue 1 and the signal stop is amino acid residue 33.

[0252] SEQ ID NO 61 is a full-length amino acid sequence from the cDNA sequence of SEQ ID NO 127 from Chaetomium megalocarpum. The signal start is amino acid residue 1 and the signal stop is amino acid residue 37.

[0253] SEQ ID NO 62 is a full-length amino acid sequence from the cDNA sequence of SEQ ID NO 128 from Chaetomium thermophilum var. thermophilum. The signal start is amino acid residue 1 and the signal stop is amino acid residue 33.

[0254] SEQ ID NO 63 is a full-length amino acid sequence from the cDNA sequence of SEQ ID NO 129 from Humicola hyalothermophila. The signal start is amino acid residue 1 and the signal stop is amino acid residue 34.

[0255] SEQ ID NO 64 is a full-length amino acid sequence from the cDNA sequence of SEQ ID NO 130 from Subramaniula anamorphosa. The signal start is amino acid residue 1 and the signal stop is amino acid residue 36 (based signal aligment with other four Fe-SOD).

[0256] SEQ ID NO 65 is a full-length amino acid sequence from the cDNA sequence of SEQ ID NO 131 from Sphingobacterium sp. T2. The signal start is residue 1 and the singal stop is residue 24.

[0257] SEQ ID NO 66 is a full-length amino acid sequence from the cDNA sequence of SEQ ID NO 132 from Trichoderma rossicum. The signal start is amino acid residue 1 and the signal stop is amino acid residue 24.

[0258] SEQ ID NO 67 is a full-length amino acid sequence from the cDNA sequence of SEQ ID NO 133 from Trichoderma lixii. The signal start is amino acid residue 1 and the signal stop is amino acid residue 19.

[0259] SEQ ID NO 68 is a full-length amino acid sequence from the cDNA sequence of SEQ ID NO 134 from Trichoderma sp-54723 The signal start is amino acid residue 1 and the signal stop is amino acid residue 20.

[0260] SEQ ID NO 69 is a full-length amino acid sequence from the cDNA sequence of SEQ ID NO 135 from Aspergillus niveus. The signal start is amino acid residue 1 and the signal stop is amino acid residue 16.

[0261] SEQ ID NO 70 is a full-length amino acid sequence from the cDNA sequence of SEQ ID NO 136 from Aspergillus templicola. The signal start is amino acid residue 1 and the signal stop is amino acid residue 19.

[0262] SEQ ID NO 71 is a full-length amino acid sequence from the cDNA sequence of SEQ ID NO 137 from Pochonia chlamydosporia var. spinulospora. The signal start is amino acid residue 1 and the signal stop is amino acid residue 17.

[0263] SEQ ID NO 72 is a full-length amino acid sequence from the cDNA sequence of SEQ ID NO 140 from Trichoderma sp-54723.The signal start is amino acid residue 1 and the signal stop is amino acid residue 20.

[0264] SEQ ID NO 73 is a full-length amino acid sequence from the cDNA sequence of SEQ ID NO 141 from Trichoderma sp-44174 The signal start is amino acid residue 1 and the signal stop is amino acid residue 19.

[0265] SEQ ID NO 74 is a full-length amino acid sequence from the cDNA sequence of SEQ ID NO 142 from Metapochonia suchlasporia. The signal start is amino acid residue 1 and the signal stop is amino acid residue 17.

[0266] SEQ ID NO 75 is a full-length amino acid sequence from the cDNA sequence of SEQ ID NO 143 from Metarhizium marquandii. The signal start is amino acid residue 1 and the signal stop is amino acid residue 17.

[0267] SEQ ID NO 76 is a full-length amino acid sequence from the cDNA sequence of SEQ ID NO 144 from Diaporthe nobilis. The signal start is amino acid residue 1 and the signal stop is amino acid residue 17.

[0268] SEQ ID NO 77 is a full-length amino acid sequence from the cDNA sequence of SEQ ID NO 145 from Tolypocladium sp. XZ2627. The signal start is amino acid residue 1 and the signal stop is amino acid residue 20.

[0269] SEQ ID NO 78 is a full-length amino acid sequence from the cDNA sequence of SEQ ID NO 146 from Aspergillus japonicus The signal start is amino acid residue 1 and the signal stop is amino acid residue 21.

[0270] SEQ ID NO 79 is a full-length amino acid sequence from the cDNA sequence of SEQ ID NO 147 from Metarhizium sp. XZ2431. The signal start is amino acid residue 1 and the signal stop is amino acid residue 16.

[0271] SEQ ID NO 80 is a full-length amino acid sequence from the cDNA sequence of SEQ ID NO 148 from Armillaria ostoyae. The signal start is amino acid residue 1 and the signal stop is amino acid residue 19.

[0272] SEQ ID NO 81 is a full-length amino acid sequence from the cDNA sequence of SEQ ID NO 149 from Trichoderma spirale. The signal start is amino acid residue 1 and the signal stop is amino acid residue 19

[0273] SEQ ID NO 82 is a full-length amino acid sequence from the cDNA sequence of SEQ ID NO 150 from Aspergillus elegans. The signal start is amino acid residue 1 and the signal stop is amino acid residue 22.

[0274] SEQ ID NO 83 is a full-length amino acid sequence from the cDNA sequence of SEQ ID NO 5 from Trichoderma reesei. The signal start is amino acid residue 1 and the signal stop is amino acid residue 20.

[0275] SEQ ID NO 84 is a full-length amino acid sequence from the cDNA sequence of SEQ ID NO 87 from Aspergillus versicolor. The signal start is amino acid residue 1 and the signal stop is amino acid residue 20.

[0276] SEQ ID NO 85 is a full-length amino acid sequence from the cDNA sequence of SEQ ID NO 88 from Aspergillus deflectus. The signal start is amino acid residue 1 and the signal stop is amino acid residue 16.

[0277] SEQ ID NO 86 is a full-length amino acid sequence from the cDNA sequence of SEQ ID NO 89 from Aspergillus egyptiacus. The signal start is amino acid residue 1 and the signal stop is amino acid residue 19.

[0278] SEQ ID NO 87 is a polypeptide coding sequence from Aspergillus versicolor of the polypeptide of SEQ ID NO 84.

[0279] SEQ ID NO 88 is a polypeptide coding sequence from Aspergillus deflectus of the polypeptide of SEQ ID NO 85.

[0280] SEQ ID NO 89 is a polypeptide coding sequence from Aspergillus egyptiacus of the polypeptide of SEQ ID NO 86.

[0281] SEQ ID NO 90 is a polypeptide coding sequence from Westerdykella sp. AS85-2 of the polypeptide of SEQ ID NO: 49.

[0282] SEQ ID NO 91 is a polypeptide coding sequence from Aspergillus sp. XZ2669 of the polypeptide of SEQ ID NO: 50.

[0283] SEQ ID NO 92 is a polypeptide coding sequence from Preussia terricola of the polypeptide of SEQ ID NO 51.

[0284] SEQ ID NO 93 is a polypeptide coding sequence from Kioochaeta sp. of the polypeptide of SEQ ID NO: 52.

[0285] SEQ ID NO 94 is a polypeptide coding sequence from Kioochaeta sp. of the polypeptide of SEQ ID NO 53.

[0286] SEQ ID NO 95 is a polypeptide coding sequence from Metapochonia bulbillosa of the polypeptide of SEQ ID NO 54.

[0287] SEQ ID NO 96 is a polypeptide coding sequence from Xylomelasma sp. XZ0718 of the polypeptide of SEQ ID NO: 55.

[0288] SEQ ID NO 97 is a polypeptide coding sequence from Preussia flanaganii of the polypeptide of SEQ ID NO: 56.

[0289] SEQ ID NO 98 is a polypeptide coding sequence from Cladobotryum sp. of the polypeptide of SEQ ID NO: 18.

[0290] SEQ ID NO 99 is a polypeptide coding sequence from Westerdykella sp-46156 of the polypeptide of SEQ ID NO: 57.

[0291] SEQ ID NO 100 is a polypeptide coding sequence from Trichoderma hamatum of the polypeptide of SEQ ID NO: 58.

[0292] SEQ ID NO 101 is a polypeptide coding sequence from Mycothermus thermophilus of the

[0293] SEQ ID NO 102 is a polypeptide coding sequence from Cephalotrichiella penicillate of the polypeptide of SEQ ID NO: 160.

[0294] SEQ ID NO 103 is the amino acid sequence of a mature polypeptide having having catalase activity available from Thermoascus aurantiacus.

[0295] SEQ ID NO 104 is the amino acid sequence of a mature polypeptide having having catalase activity available from Aspergillus lentulus.

[0296] SEQ ID NO 105 is the amino acid sequence of a mature polypeptide having catalase activity available from Talaromyces stipitatus.

[0297] SEQ ID NO 106 is the amino acid sequence of a mature polypeptide having catalase activity available from Malbranchea cinnamomea.

[0298] SEQ ID NO 107 is the amino acid sequence of a mature polypeptide having catalase activity available from Crassicarpon thermophilum.

[0299] SEQ ID NO 108 is the amino acid sequence of a mature polypeptide having catalase activity available from Penicillium emersonii.

[0300] SEQ ID NO 109 is the amino acid sequence of a mature polypeptide having catalase activity available from Aspergillus versicolor.

[0301] SEQ ID NO 110 is the amino acid sequence of a mature polypeptide having catalase activity available from Thermomucor indicae-seudaticae.

[0302] SEQ ID NO 111 is the amino acid sequence of a mature polypeptide having activity available from Aspergillus fumigatus.

[0303] SEQ ID NO 112 is the amino acid sequence of a mature polypeptide having catalase activity available from Thermothelomyces thermophilus.

[0304] SEQ ID NO 113 is the amino acid sequence of a mature polypeptide having catalase activity available from Curvularia verruculosa.

[0305] SEQ ID NO 114 is the amino acid sequence of a mature polypeptide having catalase activity available from Mycothermus thermophilus

[0306] SEQ ID NO 115 is the amino acid sequence of a mature polypeptide having having catalase activity available from Mycothermus thermophilus.

[0307] SEQ ID NO 116 is the amino acid sequence of a mature polypeptide having catalase activity available from Penicillium oxalicum.

[0308] SEQ ID NO 117 is the amino acid sequence of a mature polypeptide having catalase activity available from Humicola hyalothermophila.

[0309] SEQ ID NO 118 is the amino acid sequence of a mature polypeptide having catalase activity available from Thermoascus crustaceus.

[0310] SEQ ID NO 119 is the amino acid sequence of a mature polypeptide having catalase activity available from Thielavia australiensis.

[0311] SEQ ID NO 120 is the amino acid sequence of a mature polypeptide having catalase activity available from Thielavia hyrcaniae.

[0312] SEQ ID NO 121 is the amino acid sequence of a mature polypeptide having catalase activity available from Neurospora crassa.

[0313] SEQ ID NO 122 is the amino acid sequence of a mature polypeptide having having catalase activity available from Thermoascus aurantiacus.

[0314] SEQ ID NO 123 is the amino acid sequence of a mature polypeptide having catalase activity available from Neurospora crassa.

[0315] SEQ ID NO 124 is the amino acid sequence of a mature polypeptide having catalase activity available from Thermoascus aurantiacus.

[0316] SEQ ID NO 125 is the amino acid sequence of a mature polypeptide having catalase activity available from Thermoascus aurantiacus.

[0317] SEQ ID NO 126 is the amino acid sequence of a mature polypeptide having catalase activity available from Thermoascus aurantiacus.

[0318] SEQ ID NO 127 is a polypeptide coding sequence from Chaetomium megalocarpum of the polypeptide of

[0319] SEQ ID NO 23.

[0320] SEQ ID NO 128 is a polypeptide coding sequence from Chaetomium thermophilum var. thermophilumof the polypeptide of SEQ ID NO: 24.

[0321] SEQ ID NO 129 is a polypeptide coding sequence from Humicola hyalothermophila of the polypeptide of SEQ ID NO: 25.

[0322] SEQ ID NO 130 is a polypeptide coding sequence from Subramaniula anamorphosa of the polypeptide of SEQ ID NO: 26.

[0323] SEQ ID NO 131 is a polypeptide coding sequence from Sphingobacterium sp. T2 of the polypeptide of SEQ ID NO 27.

[0324] SEQ ID NO 132 is a polypeptide coding sequence from Trichoderma rossicum of the polypeptide of SEQ ID NO 28.

[0325] SEQ ID NO 133 is a polypeptide coding sequence from Trichoderma lixii of the polypeptide of SEQ ID NO 29.

[0326] SEQ ID NO 134 is a polypeptide coding sequence from Trichoderma sp-54723 of the polypeptide of SEQ ID NO 30.

[0327] SEQ ID NO 135 is a polypeptide coding sequence from Aspergillus niveus of the polypeptide of SEQ ID NO 31.

[0328] SEQ ID NO 136 is a polypeptide coding sequence from Aspergillus templicola of the polypeptide of SEQ ID NO 32.

[0329] SEQ ID NO 137 is a polypeptide coding sequence from Pochonia chlamydosporia var. spinulospora of the polypeptide of SEQ ID NO 33.

[0330] SEQ ID NO 138 is a polypeptide coding sequence from Trichoderma sp-44174 of the polypeptide of SEQ ID NO 34.

[0331] SEQ ID NO 139 is a polypeptide coding sequence from Trichoderma rossicum of the polypeptide of SEQ ID NO 36.

[0332] SEQ ID NO 140 is a polypeptide coding sequence from Trichoderma sp-54723 of the polypeptide of SEQ ID NO: 38.

[0333] SEQ ID NO 141 is a polypeptide coding sequence from Trichoderma sp-44174 of the polypeptide of SEQ ID NO: 39.

[0334] SEQ ID NO 142 is a polypeptide coding sequence from Metapochonia suchlasporia of the polypeptide of SEQ ID NO: 40.

[0335] SEQ ID NO 143 is a polypeptide coding sequence from Metarhizium marquandii of the polypeptide of SEQ ID NO 41.

[0336] SEQ ID NO 144 is a polypeptide coding sequence from Diaporthe nobilis of the polypeptide of SEQ ID NO 42.

[0337] SEQ ID NO 145 is a polypeptide coding sequence from Tolypocladium sp. XZ2627 of the polypeptide of SEQ ID NO 43.

[0338] SEQ ID NO 146 is a polypeptide coding sequence from Tolypocladium sp. XZ2627 of the polypeptide of SEQ ID NO 44.

[0339] SEQ ID NO 147 is a polypeptide coding sequence from Metarhizium sp. XZ2431 of the polypeptide of SEQ ID NO 45.

[0340] SEQ ID NO 148 is a polypeptide coding sequence from Armillaria ostoyae of the polypeptide of SEQ ID NO 46.

[0341] SEQ ID NO 149 is a polypeptide coding sequence from Trichoderma spirale of the polypeptide of SEQ ID NO 47.

[0342] SEQ ID NO 150 is a polypeptide coding sequence from Aspergillus elegans of the polypeptide of SEQ ID NO 48.

[0343] SEQ ID NO 151 is a full-length amino acid sequence of a polypeptide with catalase activity from the cDNA sequence of SEQ ID NO 175 from Thermoascus aurantiacus.

[0344] SEQ ID NO 152 is a full-length amino acid sequence of a polypeptide with catalase activity from the cDNA sequence of SEQ ID 176 from Aspergillus lentulus.

[0345] SEQ ID NO 153 is a full-length amino acid sequence of a polypeptide with catalase activity from the cDNA sequence of SEQ ID 177 from Talaromyces stipitatus

[0346] SEQ ID NO 154 is a full-length amino acid sequence of a polypeptide with catalase activity from the cDNA sequence of SEQ ID 178 from Malbranchea cinnamomea.

[0347] SEQ ID NO 155 is a full-length amino acid sequence of a polypeptide with catalase activity from the cDNA sequence of SEQ ID 179 Crassicarpon thermophilum.

[0348] SEQ ID NO 156 is a full-length amino acid sequence of a polypeptide with catalase activity from the cDNA sequence of SEQ ID 180 from Penicillium emersonii.

[0349] SEQ ID NO 157 is a full-length amino acid sequence of a polypeptide with catalase activity from the cDNA sequence of SEQ ID 181 from Aspergillus versicolor.

[0350] SEQ ID NO 158 is a full-length amino acid sequence of a polypeptide with catalase activity from the cDNA sequence of SEQ ID 182 from Thermomucor indicae-seudaticae

[0351] SEQ ID NO 159 is a full-length amino acid sequence of a polypeptide with catalase activity from the cDNA sequence of SEQ ID 183 from Aspergillus fumigatus

[0352] SEQ ID NO 160 is a full-length amino acid sequence of a polypeptide with catalase activity from the cDNA sequence of SEQ ID 184 from Thermothelomyces thermophilus.

[0353] SEQ ID NO 161 is a full-length amino acid sequence of a polypeptide with catalase activity from the cDNA sequence of SEQ ID 185 from Curvularia verruculosa.

[0354] SEQ ID NO 162 is a full-length amino acid sequence of a polypeptide with catalase activity from the cDNA sequence of SEQ ID 186 from Mycothermus thermophilus.

[0355] SEQ ID NO 163 is a full-length amino acid sequence with catalase activity from the cDNA sequence of SEQ ID 187 from Mycothermus thermophilus.

[0356] SEQ ID NO 164 is a full-length amino acid sequence with catalase activity from the cDNA sequence of SEQ ID 188 from Penicillium oxalicum

[0357] SEQ ID NO 165 is a full-length amino acid sequence with catalase activity from the cDNA sequence of SEQ ID 189 from Humicola hyalothermophila.

[0358] SEQ ID NO 166 is a full-length amino acid sequence with catalase activity from the cDNA sequence of SEQ ID 190 from Thermoascus crustaceus.

[0359] SEQ ID NO 167 is a full-length amino acid sequence with catalase activity from the cDNA sequence of SEQ ID 191 from Thielavia australiensis.

[0360] SEQ ID NO 168 is a full-length amino acid sequence with catalase activity from the cDNA sequence of SEQ ID 192 from Thielavia hyrcaniae.

[0361] SEQ ID NO 169 is a full-length amino acid sequence with catalase activity from the cDNA sequence of SEQ ID 193 from Neurospora crassa.

[0362] SEQ ID NO 170 is a full-length amino acid sequence with catalase activity from the cDNA sequence of SEQ ID 194 from Thermoascus aurantiacus.

[0363] SEQ ID NO 171 is a full-length amino acid sequence with catalase activity from the cDNA sequence of SEQ ID 195 from Neurospora crassa.

[0364] SEQ ID NO 172 is a full-length amino acid sequence with catalase activity from the cDNA sequence of SEQ ID 196 from Thermoascus aurantiacus.

[0365] SEQ ID NO 173 is a full-length amino acid sequence with catalase activity from the cDNA sequence of SEQ ID 197 from Thermoascus aurantiacus.

[0366] SEQ ID NO 174 is a full-length amino acid sequence with catalase activity from the cDNA sequence of SEQ ID 198 from Thermoascus aurantiacus.

[0367] SEQ ID NO 175 is a polypeptide coding sequence from Thermoascus aurantiacus coding for the polypeptide of SEQ ID NO 151.

[0368] SEQ ID NO 176 is a polypeptide coding sequence from Aspergillus lentulus coding for the polypeptide of SEQ ID NO 152.

[0369] SEQ ID NO 177 is a polypeptide coding sequence from Talaromyces stipitatus coding for the polypeptide of SEQ ID NO 153.

[0370] SEQ ID NO 178 is a polypeptide coding sequence from Malbranchea cinnamomea coding for the polypeptide of SEQ ID NO 154.

[0371] SEQ ID NO 179 is a polypeptide coding sequence from Crassicarpon thermophilum coding for the polypeptide of SEQ ID NO 155.

[0372] SEQ ID NO 180 is a polypeptide coding sequence from Penicillium emersonii coding for the polypeptide of SEQ ID NO 156.

[0373] SEQ ID NO 181 is a polypeptide coding sequence from Aspergillus versicolor coding for the polypeptide of SEQ ID NO 157.

[0374] SEQ ID NO 182 is a polypeptide coding sequence from Thermomucor indicae-seudaticae coding for the polypeptide of SEQ ID NO 158.

[0375] SEQ ID NO 183 is a polypeptide coding sequence from Aspergillus fumigatus coding for the polypeptide of SEQ ID NO 159.

[0376] SEQ ID NO 184 is a polypeptide coding sequence from Thermothelomyces thermophilus coding for the polypeptide of SEQ ID NO 160.

[0377] SEQ ID NO 185 is a polypeptide coding sequence from Curvularia verruculosa coding for the polypeptide of SEQ ID NO 161.

[0378] SEQ ID NO 186 is a polypeptide coding sequence from Mycothermus thermophilus coding for the polypeptide of SEQ ID NO 162.

[0379] SEQ ID NO 187 is a polypeptide coding sequence from Mycothermus thermophilus coding for the polypeptide of SEQ ID NO 163.

[0380] SEQ ID NO 188 is a polypeptide coding sequence from Penicillium oxalicum coding for the polypeptide of SEQ ID NO 164.

[0381] SEQ ID NO 189 is a polypeptide coding sequence from Humicola hyalothermophila coding for the polypeptide of SEQ ID NO 165.

[0382] SEQ ID NO 190 is a polypeptide coding sequence from Thermoascus crustaceus coding for the polypeptide of SEQ ID NO 160.

[0383] SEQ ID NO 191 is a polypeptide coding sequence from Thielavia australiensis coding for the polypeptide of SEQ ID NO 167.

[0384] SEQ ID NO 192 is a polypeptide coding sequence from Thielavia hyrcaniae coding for the polypeptide of SEQ ID NO 168.

[0385] SEQ ID NO 193 is a polypeptide coding sequence from Neurospora crassa coding for the polypeptide of SEQ ID NO 169.

[0386] SEQ ID NO 194 is a polypeptide coding sequence from Thermoascus aurantiacus coding for the polypeptide of SEQ ID NO 170.

[0387] SEQ ID NO 195 is a polypeptide coding sequence from Neurospora crassa coding for the polypeptide of SEQ ID NO 171.

[0388] SEQ ID NO 196 is a polypeptide coding sequence from Thermoascus aurantiacus coding for the polypeptide of SEQ ID NO 172.

[0389] SEQ ID NO 197 is a polypeptide coding sequence from Thermoascus aurantiacus coding for the polypeptide of SEQ ID NO 173.

[0390] SEQ ID NO 198 is a polypeptide coding sequence from Thermoascus aurantiacus coding for the polypeptide of SEQ ID NO 174.

[0391] SEQ ID NO 199 is the amino acid sequence of a mature polypeptide having superoxide dismutase (SOD) activity available from Trichoderma sinuosum (0434SD).

[0392] SEQ ID NO 200 is the amino acid sequence of a mature polypeptide having superoxide dismutase (SOD) activity available from Trichoderma virens (032VB5).

[0393] SEQ ID NO 201 is the amino acid sequence of a mature polypeptide having superoxide dismutase (SOD) activity available from Trichoderma harzianum (04).

[0394] SEQ ID NO 202 is the amino acid sequence of a mature polypeptide having superoxide dismutase (SOD) activity available from Fusicolla acetilerea.

[0395] SEQ ID NO 203 is the amino acid sequence of a mature polypeptide having superoxide dismutase (SOD) activity available from Plectosphaerella sp. 1-29.

[0396] SEQ ID NO 204 is the amino acid sequence of a mature polypeptide having superoxide dismutase (SOD) activity available from Mariannaea punicea.

[0397] SEQ ID NO 205 is the amino acid sequence of a mature polypeptide having superoxide dismutase (SOD) activity available from Penicillium oxalicum.

[0398] SEQ ID NO 206 is the amino acid sequence of a mature polypeptide having superoxide dismutase (SOD) activity available from Colletotrichum sp-71086.

[0399] SEQ ID NO 207 is the amino acid sequence of a mature polypeptide having superoxide dismutase (SOD) activity available from Aspergillus sp. nov. XZ3202.

[0400] SEQ ID NO 208 is the amino acid sequence of a mature polypeptide having superoxide dismutase (SOD) activity available from Trichoderma parapiluliferum.

[0401] SEQ ID NO 209 is the amino acid sequence of a mature polypeptide having superoxide dismutase (SOD) activity available from Aspergillus sp. nov. XZ3202.

[0402] SEQ ID NO 210 is a full-length amino acid sequence from the cDNA sequence of SEQ ID NO 221 from Trichoderma sinuosum. The signal start is amino acid residue 1 and the signal stop is amino acid residue 19.

[0403] SEQ ID NO 211 is a full-length amino acid sequence from the cDNA sequence of SEQ ID NO 222 from Trichoderma virens. The signal start is amino acid residue 1 and the signal stop is amino acid residue 19.

[0404] SEQ ID NO 212 is a full-length amino acid sequence from the cDNA sequence of SEQ ID NO 223 from Trichoderma harzianum. The signal start is amino acid residue 1 and the signal stop is amino acid residue 19.

[0405] SEQ ID NO 213 is a full-length amino acid sequence from the cDNA sequence of SEQ ID NO 224 from Fusicolla acetilerea. The signal start is amino acid residue 1 and the signal stop is amino acid residue 19. With no native signal, a signal and propeptide was added at its N-terminal, and MVK was removed from the N-terminal.

[0406] SEQ ID NO 214 is a full-length amino acid sequence from the cDNA sequence of SEQ ID NO 225 from Plectosphaerella sp. 1-29.

[0407] SEQ ID NO 215 is a full-length amino acid sequence from the cDNA sequence of SEQ ID NO 226 from Mariannaea punicea.

[0408] SEQ ID NO 216 is a full-length amino acid sequence from the cDNA sequence of SEQ ID NO 227 from Penicillium oxalicum.

[0409] SEQ ID NO 217 is a full-length amino acid sequence from the cDNA sequence of SEQ ID NO 228 from Colletotrichum sp-71086. The signal start is amino acid residue 1 and the signal stop is amino acid residue 20.

[0410] SEQ ID NO 218 is a full-length amino acid sequence from the cDNA sequence of SEQ ID NO 229 from Aspergillus sp. nov. XZ3202. The signal start is amino acid residue 1 and the signal stop is amino acid residue 16.

[0411] SEQ ID NO 219 is a full-length amino acid sequence from the cDNA sequence of SEQ ID NO 230 from Trichoderma parapiluliferum. The signal start is amino acid residue 1 and the signal stop is amino acid residue 18.

[0412] SEQ ID NO 220 is a full-length amino acid sequence from the cDNA sequence of SEQ ID NO 231 from Aspergillus sp. nov. XZ3202. The signal start is amino acid residue 1 and the signal stop is amino acid residue 19.

[0413] SEQ ID NO 221 is a polypeptide coding sequence of the polypeptide of SEQ ID NO 210 from Trichoderma sinuosum.

[0414] SEQ ID NO 222 is a polypeptide coding sequence of the polypeptide of SEQ ID NO 211 from Trichoderma virens.

[0415] SEQ ID NO 223 is a polypeptide coding sequence of the polypeptide of SEQ ID NO 212 from Trichoderma harzianum.

[0416] SEQ ID NO 224 is a polypeptide coding sequence of the polypeptide of SEQ ID NO 213 from Fusicolla acetilerea.

[0417] SEQ ID NO 225 is a polypeptide coding sequence of the polypeptide of SEQ ID NO 214 from Plectosphaerella sp. 1-29.

[0418] SEQ ID NO 226 is a polypeptide coding sequence of the polypeptide of SEQ ID NO 215 from Mariannaea punicea.

[0419] SEQ ID NO 227 is a polypeptide coding sequence of the polypeptide of SEQ ID NO 216 from Penicillium oxalicum.

[0420] SEQ ID NO 228 is a polypeptide coding sequence of the polypeptide of SEQ ID NO 217 from Colletotrichum sp-71086.

[0421] SEQ ID NO 229 is a polypeptide coding sequence of the polypeptide of SEQ ID NO: 218 from Aspergillus sp. nov. XZ3202 (O14ETD).

[0422] SEQ ID NO 230 is a polypeptide coding sequence of the polypeptide of SEQ ID NO: 219 from Trichoderma parapiluliferum (072ZVS).

[0423] SEQ ID NO 231 is a polypeptide coding sequence of the polypeptide of SEQ ID NO: 220 from Aspergillus sp. nov. XZ3202.

[0424] SEQ ID NO 232 is the amino acid sequence of a mature polypeptide having superoxide dismutase (SOD) activity from Mucor sp. XZ2651.

[0425] SEQ ID NO 233 is the amino acid sequence of a mature polypeptide having superoxide dismutase (SOD) activity from Rhizomucor miehei.

[0426] SEQ ID NO 234 is the amino acid sequence of a mature polypeptide having superoxide dismutase (SOD) activity from Mucor sp. XZ2651.

[0427] SEQ ID NO 235 is the amino acid sequence of a mature polypeptide having superoxide dismutase (SOD) activity from Amphisphaeriaceae sp-43674.

[0428] SEQ ID NO 236 is the amino acid sequence of a mature polypeptide having superoxide dismutase (SOD) activity from Humicola fuscoatra.

[0429] SEQ ID NO 237 is the amino acid sequence of a mature polypeptide having superoxide dismutase (SOD) activity from Valsaria rubricosa.

[0430] SEQ ID NO 238 is a full-length amino acid sequence from the cDNA sequence of SEQ ID NO 244 DNA from Mucor sp. XZ2651. The signal start is amino acid residue 1 and the signal stop is amino acid residue 17.

[0431] SEQ ID NO 239 is a full-length amino acid sequence from the cDNA sequence of SEQ ID NO 245 DNA from Rhizomucor miehei. The signal start is amino acid residue 1 and the signal stop is amino acid residue 13.

[0432] SEQ ID NO 240 is a full-length amino acid sequence from the cDNA sequence of SEQ ID NO 246 DNA from Mucor sp. XZ2651. The signal start is amino acid residue 1 and the signal stop is amino acid residue 17.

[0433] SEQ ID NO 241 is a full-length amino acid sequence from the cDNA sequence of SEQ ID NO 247 DNA from Amphisphaeriaceae sp-43674. The signal start is amino acid residue 1 and the signal stop is amino acid residue 18.

[0434] SEQ ID NO 242 is a full-length amino acid sequence from the cDNA sequence of SEQ ID NO 248 DNA from Humicola fuscoatra. The signal start is amino acid residue 1 and the signal stop is amino acid residue 17.

[0435] SEQ ID NO 243 is a full-length amino acid sequence from the cDNA sequence of SEQ ID NO 249 DNA from Valsaria rubricosa. The signal start is amino acid residue 1 and the signal stop is amino acid residue 18.

[0436] SEQ ID NO 244 is a polypeptide coding sequence of the polypeptide of SEQ ID NO 238 from Mucor sp. XZ2651.

[0437] SEQ ID NO 245 is a polypeptide coding sequence of the polypeptide of SEQ ID NO 239 from Rhizomucor miehei

[0438] SEQ ID NO 246 is a polypeptide coding sequence of the polypeptide of SEQ ID NO 240 from Mucor sp. XZ2651.

[0439] SEQ ID NO 247 is a polypeptide coding sequence of the polypeptide of SEQ ID NO 241 from Amphisphaeriaceae sp-43674.

[0440] SEQ ID NO 248 is a polypeptide coding sequence of the polypeptide of SEQ ID NO 242 from from Humicola fuscoatra.

[0441] SEQ ID NO 249 is a polypeptide coding sequence of the polypeptide of SEQ ID NO 243 from Valsaria rubricosa.

[0442] SEQ ID NO 250 is the amino acid sequence of a mature polypeptide having catalase activity from Thermoascus aurantiacus comprising 724 amino acid residues. SEQ ID NO 250 the mature polypeptide of the catalase sold under the tradename Terminox™.

[0443] SEQ ID NO 251 is a full-length amino acid sequence of a polypeptide from Thermoascus aurantiacus having catalase activity comprising 740 amino acid residues, sold under the tradename Terminox™. The signal start is amino acid residue 1 and the signal stop is amino acid residue 16.

TABLE 1a
Super Oxide Dismutases and their polypeptide coding sequences

| | SEQ ID NO | SEQ ID NO | SEQ ID NO |
|---|---|---|---|
| Source | Mature peptide | Full polypeptide | DNA |
| Trichoderma reesei | SED ID NO 1 | SEQ ID NO 83 | SEQ ID NO 5 |
| Aspergillus | SED ID NO 2 | SEQ ID NO 84 | SEQ ID NO 87 |
| versicolor | | | |
| Aspergillus | SEQ ID NO 3 | SEQ ID NO 85 | SEQ ID NO 88 |
| deflectus | | | |
| Aspergillus | SEQ ID NO 4 | SEQ ID NO 86 | SEQ ID NO 89 |
| egyptiacus | | | |
| Westerdykella | SEQ ID NO 9 | SEQ ID NO 49 | SEQ ID NO 90 |
| sp. A585-2 | | | |
| Aspergillus | SEQ ID NO 10 | SEQ ID NO 50 | SEQ ID NO 91 |
| sp. XZ2669 | | | |
| Preussia terricola | SEQ ID NO 11 | SEQ ID NO 51 | SEQ ID NO 92 |
| Kionochaeta sp. | SEQ ID NO 12 | SEQ ID NO 52 | SEQ ID NO 93 |
| Kionochaeta sp. | SEQ ID NO 13 | SEQ ID NO 53 | SEQ ID NO 94 |
| Metapochonia | SEQ ID NO 14 | SEQ ID NO 54 | SEQ ID NO 95 |
| bulbillosa | | | |
| Xylomelasma | SEQ ID NO 15 | SEQ ID NO 55 | SEQ ID NO 96 |
| sp. XZ0718 | | | |
| Preussia flanaganii | SEQ ID NO 16 | SEQ ID NO 56 | SEQ ID NO 97 |
| Cladobotryum sp. | SEQ ID NO 17 | SEQ ID NO 18 | SEQ ID NO 98 |
| Westerdykella | SEQ ID NO 19 | SEQ ID NO 57 | SEQ ID NO 99 |
| sp-46156 | | | |
| Trichoderma | SEQ ID NO 20 | SEQ ID NO 58 | SEQ ID NO 100 |
| hamatum | | | |
| Mycothermus | SEQ ID NO 21 | SEQ ID NO 59 | SEQ ID NO 101 |
| thermophilus | | | |
| Cephalotrichiella | SEQ ID NO 22 | SEQ ID NO 60 | SEQ ID NO 102 |
| penicillata | | | |
| Chaetomium | SEQ ID NO 23 | SEQ ID NO 61 | SEQ ID NO 127 |
| megalocarpum | | | |
| Chaetomium | SEQ ID NO 24 | SEQ ID NO 62 | SEQ ID NO 128 |
| thermophilum | | | |
| var. thermophilum | | | |
| Humicola | SEQ ID NO 25 | SEQ ID NO 63 | SEQ ID NO 129 |
| hyalothermophila | | | |
| Subramaniula | SEQ ID NO 26 | SEQ ID NO 64 | SEQ ID NO 130 |
| anamorphosa | | | |
| Sphingobacterium | SEQ ID NO 27 | SEQ ID NO 65 | SEQ ID NO 131 |
| sp. T2 | | | |
| Trichoderma | SEQ ID NO 28 | SEQ ID NO 66 | SEQ ID NO 132 |
| rossicum | | | |
| Trichoderma lixii | SEQ ID NO 29 | SEQ ID NO 67 | SEQ ID NO 133 |
| Trichoderma | SEQ ID NO 30 | SEQ ID NO 68 | SEQ ID NO 134 |
| sp-54723 | | | |
| Aspergillus niveus | SEQ ID NO 31 | SEQ ID NO 69 | SEQ ID NO 135 |
| Aspergillus | SEQ ID NO 32 | SEQ ID NO 70 | SEQ ID NO 136 |
| templicola | | | |
| Pochonia | SEQ ID NO 33 | SEQ ID NO 71 | SEQ ID NO 137 |
| chlamydosporia | | | |
| var. spinulospora | | | |
| Trichoderma | SEQ ID N034 | SEQ ID N035 | SEQ ID NO 138 |
| sp-44174 | | | |
| Trichoderma | SEQ ID NO 36 | SEQ ID NO 37 | SEQ ID NO 139 |
| rossicum | | | |
| Trichoderma | SEQ ID NO 38 | SEQ ID NO 72 | SEQ ID NO 140 |
| sp-54723 | | | |
| Trichoderma | SEQ ID NO 39 | SEQ ID NO 73 | SEQ ID NO 141 |
| sp-44174 | | | |
| Metapochonia | SEQ ID NO 40 | SEQ ID NO 74 | SEQ ID NO 142 |
| suchlasporia | | | |
| Metarhizium | SEQ ID NO 41 | SEQ ID NO 75 | SEQ ID NO 143 |
| marquandii | | | |
| Diaporthe nobilis | SEQ ID NO 42 | SEQ ID NO 76 | SEQ ID NO 144 |
| Tolypocladium | SEQ ID NO 43 | SEQ ID NO 77 | SEQ ID NO 145 |
| sp. XZ2627 | | | |
| Aspergillus | SEQ ID NO 44 | SEQ ID NO 78 | SEQ ID NO 146 |
| japonicus | | | |
| Metarhizium | SEQ ID NO 45 | SEQ ID NO 79 | SEQ ID NO 147 |
| sp. XZ2431 | | | |
| Armillaria ostoyae | SEQ ID NO 46 | SEQ ID NO 80 | SEQ ID NO 148 |
| Trichoderma spirale | SEQ ID NO 47 | SEQ ID NO 81 | SEQ ID NO 149 |
| Aspergillus elegans | SEQ ID NO 48 | SEQ ID NO 82 | SEQ ID NO 150 |
| Trichoderma | SEQ ID NO 199 | SEQ ID NO 210 | SEQ ID NO 221 |
| sinuosum | | | |
| Trichoderma virens | SEQ ID NO 200 | SEQ ID NO 211 | SEQ ID NO 222 |
| Trichoderma | SEQ ID NO 201 | SEQ ID NO 212 | SEQ ID NO 223 |
| harzianum | | | |
| Fusicolla acetilerea | SEQ ID NO 202 | SEQ ID NO 213 | SEQ ID NO 224 |
| Plectosphaerella | SEQ ID NO 203 | SEQ ID NO 214 | SEQ ID NO 225 |
| sp. 1-29 | | | |
| Mariannaea punicea | SEQ ID NO 204 | SEQ ID NO 215 | SEQ ID NO 226 |
| Penicillium | SEQ ID NO 205 | SEQ ID NO 216 | SEQ ID NO 227 |
| oxalicum | | | |
| Colletotrichum | SEQ ID NO 206 | SEQ ID NO 217 | SEQ ID NO 228 |
| sp-71086 | | | |
| Aspergillus sp. nov. | SEQ ID NO 207 | SEQ ID NO 218 | SEQ ID NO 229 |
| XZ3202 | | | |
| Trichoderma | SEQ ID NO 208 | SEQ ID NO 219 | SEQ ID NO 230 |
| parapiluliferum | | | |
| Aspergillus sp. nov. | SEQ ID NO 209 | SEQ ID NO 220 | SEQ ID NO 231 |
| XZ3202 | | | |
| Mucor sp. XZ2651 | SEQ ID NO 232 | SEQ ID NO 238 | SEQ ID NO 244 |
| Rhizomucor miehei | SEQ ID NO 233 | SEQ ID NO 239 | SEQ ID NO 245 |
| Mucor sp. XZ2651 | SEQ ID NO 234 | SEQ ID NO 240 | SEQ ID NO 246 |
| Amphisphaeriaceae- | SEQ ID NO 235 | SEQ ID NO 241 | SEQ ID NO 247 |
| sp 43674 | | | |
| Hum icola fuscoatra | SEQ ID NO 236 | SEQ ID NO 242 | SEQ ID NO 248 |
| Valsaria rubricosa | SEQ ID NO 237 | SEQ ID NO 243 | SEQ ID NO 249 |

TABLE 1B
Catalases and their polypeptide coding sequences

| | SEQ ID NO | SEQ ID NO | SEQ ID NO |
|---|---|---|---|
| Source | Mature peptide | Full polypeptide | DNA |
| Aspergillus niger | SEQ ID NO 6 | na | na |
| Aspergillus niger | SEQ ID NO 7 | na | SEQ ID NO 8 |
| Thermoascus aurantiacus | SEQ ID NO 103 | SEQ ID NO 151 | SEQ ID NO 175 |
| Aspergillus lentulus | SEQ ID NO 104 | SEQ ID NO 152 | SEQ ID NO 176 |
| Talaromyces stipitatus | SEQ ID NO 105 | SEQ ID NO 153 | SEQ ID NO 177 |
| Malbranchea cinnamomea | SEQ ID NO 106 | SEQ ID NO 154 | SEQ ID NO 178 |
| Crassicarpon | SEQ ID NO 107 | SEQ ID NO 155 | SEQ ID NO 179 |
| thermophilum | | | |
| Penicillium emersonii | SEQ ID NO 108 | SEQ ID NO 156 | SEQ ID NO 180 |
| Aspergillus versicolor | SEQ ID NO 109 | SEQ ID NO 157 | SEQ ID NO 181 |
| Thermomucor indicae- | SEQ ID NO 110 | SEQ ID NO 158 | SEQ ID NO 182 |
| seudaticae | | | |
| Aspergillus fumigatus | SEQ ID NO 111 | SEQ ID NO 159 | SEQ ID NO 183 |
| Thermothelomyces | SEQ ID NO 112 | SEQ ID NO 160 | SEQ ID NO 184 |
| thermophilus | | | |
| Curvularia verruculosa | SEQ ID NO 113 | SEQ ID NO 161 | SEQ ID NO 185 |
| Mycothermus | SEQ ID NO 114 | SEQ ID NO 162 | SEQ ID NO 186 |
| thermophilus | | | |
| Mycothermus | SEQ ID NO 115 | SEQ ID NO 163 | SEQ ID NO 187 |
| thermophilus | | | |
| Penicillium oxalicum | SEQ ID NO 116 | SEQ ID NO 164 | SEQ ID NO 188 |
| Humicola | SEQ ID NO 117 | SEQ ID NO 165 | SEQ ID NO 189 |
| hyalothermophila | | | |
| Thermoascus crustaceus | SEQ ID NO 118 | SEQ ID NO 166 | SEQ ID NO 190 |
| Thielavia australiensis | SEQ ID NO 119 | SEQ ID NO 167 | SEQ ID NO 191 |
| Thielavia hyrcaniae | SEQ ID NO 120 | SEQ ID NO 168 | SEQ ID NO 192 |
| Neurospora crassa | SEQ ID NO 121 | SEQ ID NO 169 | SEQ ID NO 193 |
| Thermoascus aurantiacus | SEQ ID NO 122 | SEQ ID NO 170 | SEQ ID NO 194 |
| Neurospora crassa | SEQ ID NO 123 | SEQ ID NO 171 | SEQ ID NO 195 |
| Thermoascus aurantiacus | SEQ ID NO 124 | SEQ ID NO 172 | SEQ ID NO 196 |
| Thermoascus aurantiacus | SEQ ID NO 125 | SEQ ID NO 173 | SEQ ID NO 197 |
| Thermoascus aurantiacus | SEQ ID NO 126 | SEQ ID NO 174 | SEQ ID NO 198 |
| Thermoascus aurantiacus | SEQ ID NO 250 | SEQ ID NO 251 | |

### DETAILED DESCRIPTION OF THE INVENTION

### DEFINITIONS

[0444] Animal: The term “animal” refers to any animal except humans. Examples of animals are monogastric animals, including but not limited to pigs or swine (including, but not limited to, piglets, growing pigs, and sows); poultry such as turkeys, ducks, quail, guinea fowl, geese, pigeons (including squabs) and chicken (including but not limited to broiler chickens (referred to herein as broiles), chicks, layer hens (referred to herein as layers)); pets such as cats and dogs; horses (including but not limited to hotbloods, coldbloods and warm bloods) crustaceans (including but not limited to shrimps and prawns) and fish (including but not limited to amberjack, arapaima, barb, bass, bluefish, bocachico, bream, bullhead, cachama, carp, catfish, catla, chanos, char, cichlid, cobia, cod, crappie, dorada, drum, eel, goby, goldfish, gourami, grouper, guapote, halibut, java, labeo, lai, loach, mackerel, milkfish, mojarra, mudfish, mullet, paco, pearlspot, pejerrey, perch, pike, pompano, roach, salmon, sampa, sauger, sea bass, seabream, shiner, sleeper, snakehead, snapper, snook, sole, spinefoot, sturgeon, sunfish, sweetfish, tench, terror, tilapia, trout, tuna, turbot, vendace, walleye and whitefish).

[0445] Animal feed: The term “animal feed” refers to any compound, preparation, or mixture suitable for, or intended for intake by an animal. Animal feed for a monogastric animal typically comprises concentrates as well as vitamins, minerals, enzymes, direct fed microbial, amino acids and/or other feed ingredients (such as in a premix) whereas animal feed for ruminants generally comprises forage (including roughage and silage) and may further comprise concentrates as well as vitamins, minerals, enzymes direct fed microbial, amino acid and/or other feed ingredients (such as in a premix).

[0446] Concentrates: The term “concentrates” means feed with high protein and energy concentrations, such as fish meal, molasses, oligosaccharides, sorghum, seeds and grains (either whole or prepared by crushing, milling, etc. from e.g. corn, oats, rye, barley, wheat), oilseed press cake (e.g. from cottonseed, safflower, sunflower, soybean (such as soybean meal), rapeseed/canola, peanut or groundnut), palm kernel cake, yeast derived material and distillers grains (such as wet distillers grains (WDS) and dried distillers grains with solubles (DDGS)).

[0447] Feed efficiency: The term “feed efficiency” means the amount of weight gain per unit of feed when the animal is fed ad-libitum or a specified amount of food during a period of time. By “increased feed efficiency” it is meant that the use of a feed additive composition according the present invention in feed results in an increased weight gain per unit of feed intake compared with an animal fed without said feed additive composition being present.

[0448] Feed Conversion Ratio (FCR): FCR is a measure of an animal's efficiency in converting feed mass into increases of the desired output. Animals raised for meat—such as swine, poultry and fish—the output is the mass gained by the animal. Specifically, FCR is calculated as feed intake divided by weight gain, all over a specified period. Improvement in FCR means reduction of the FCR value. An FCR improvement of 2% means that the FCR was reduced by 2%.

[0449] Feed Premix: The incorporation of the composition of feed additives as exemplified herein above to animal feeds, for example poultry feeds, is in practice carried out using a concentrate or a premix. A premix designates a preferably uniform mixture of one or more microingredients with diluent and/or carrier. Premixes are used to facilitate uniform dispersion of micro-ingredients in a larger mix. A premix according to the invention can be added to feed ingredients or to the drinking water as solids (for example as water soluble powder) or liquids.

[0450] European Production Efficiency Factor (EPEF): The European Production Efficiency Factor is a way of comparing the performance of animals. This single-figure facilitates comparison of performance within and among farms and can be used to assess environmental, climatic and animal management variables. The EPEF is calculated as [(liveability (%) x Liveweight (kg))/(Age at depletion (days) x FCR)] x 100, wherein livability is the percentage of animals alive at slaughter, Liveweight is the average weight of the animals at slaughter, age of depletion is the age of the animals at slaughter and FCR is the feed conversion ratio at slaughter.

[0451] Forage: The term “forage” as defined herein also includes roughage. Forage is fresh plant material such as hay and silage from forage plants, grass and other forage plants, seaweed, sprouted grains and legumes, or any combination thereof. Examples of forage plants are Alfalfa (lucerne), birdsfoot trefoil, brassica (e.g. kale, rapeseed (canola), rutabaga (swede), turnip), clover (e.g. alsike clover, red clover, subterranean clover, white clover), grass (e.g. Bermuda grass, brome, false oat grass, fescue, heath grass, meadow grasses, orchard grass, ryegrass, Timothy-grass), corn (maize), millet, barley, oats, rye, sorghum, soybeans and wheat and vegetables such as beets. Forage further includes crop residues from grain production (such as corn stover; straw from wheat, barley, oat, rye and other grains); residues from vegetables like beet tops; residues from oilseed production like stems and leaves form soy beans, rapeseed and other legumes; and fractions from the refining of grains for animal or human consumption or from fuel production or other industries.

[0452] Fragment: The term “fragment” means a polypeptide or a catalytic domain having one or more (e.g., several) amino acids absent from the amino and/or carboxyl terminus of a mature polypeptide or domain; wherein the fragment has SOD activity.several) amino acids absent from the amino and/or carboxyl terminus of a mature polypeptide or domain; wherein the fragment has SOD activity.

[0453] In one aspect, a fragment of a GH24 SOD (such as one of SEQ ID NO: 63 to 71) comprises at least 230 amino acids, such as at least 235 amino acids, at least 240 amino acids, or at least 245 amino acids and has SOD activity. In another aspect, a fragment of a GH24 SOD (such as one of SEQ ID NO: 63 to 71) comprises at least 90% of the length of the mature polypeptide, such as at least 92%, at least 94%, at least 96%, at least 98% or at least 99% of the length of the mature polypeptide and has SOD activity.

[0454] In one aspect, a fragment of a GH25 SOD (such as one of SEQ ID NO: 1 to 72) comprises at least 180 amino acids, such as at least 185 amino acids, at least 190 amino acids, at least 195 amino acids, at least 200 amino acids, at least 205 amino acids or at least 210 amino acids and has SOD activity. In another aspect, a fragment of a GH25 SOD (such as one of SEQ ID NO: 1 to 72) comprises at least 90% of the length of the mature polypeptide, such as at least 92%, at least 94%, at least 96%, at least 98% or at least 99% of the length of the mature polypeptide and has SOD activity.

[0455] Fungal origin: The term “fungal origin” is intended to mean, in reference to a superoxide dismutase, that the source of the enzyme in a fungus. A fungus is any member of the group of eukaryotic organisms that includes microorganisms such as yeasts and molds, as well as the more familiar mushrooms. These organisms are classified as a kingdom, fungi. Currently, seven phyla are proposed: Microsporidia, Chytridiomycota, Blastocladiomycota, Neocallimastigomycota, Glomeromycota, Ascomycota, and Basidiomycota. Suitable examples include, without limitation, Trichoderma reesei, Aspergillus versicolor, Aspergillus deflectus, Aspergillus egyptiacus, Westerdykella sp. AS85-2, Aspergillus sp. XZ2669, Preussia terricola, Kioochaeta sp., Metapochonia bulbillosa, Xylomelasma sp. XZ0718, Preussia flanaganii, Cladobotryum sp., Westerdykella sp-46156, Trichoderma hamatum, Mycothermus thermophilus, Cephalotrichiella penicillate, Chaetomium megalocarpum, Chaetomium thermophilum var. thermophilum, Humicola hyalothermophila, Subramaniula anamorphosa, Sphingobacterium sp. T2, Trichoderma rossicum, Trichoderma lixii, Trichoderma sp-54723, Aspergillus niveus, Aspergillus templicola, Pochonia chlamydosporia var. spinulospora, Trichoderma sp-44174, Trichoderma rossicum, Trichoderma sp-54723, Trichoderma sp-44174, Metapochonia suchlasporia, Metarhizium marquandii, Diaporthe nobilis, Tolypocladium sp. XZ2627, Aspergillus japonicus, Metarhizium sp. XZ2431, Armillaria ostoyae, Trichoderma spirale, Aspergillus elegans, Trichoderma sinuosum, Trichoderma virens, Trichoderma harzianum, Fusicolla acetilerea, Plectosphaerella sp. 1-29, Mariannaea punicea, Penicillium oxalicum, Colletotrichum sp-71086, Aspergillus sp. nov. XZ3202, Trichoderma parapiluliferum, Aspergillus sp. nov. XZ3202, Mucor sp. XZ2651, Rhizomucor miehei, Mucor sp. XZ2651, Amphisphaeriaceae-sp 43674, Humicola fuscoatra and Valsaria rubricosa.

[0456] Heat Stress: Heat stress occurs when an animal's heat load is greater than its capacity to lose heat. Pigs andother animals likely experience headaches, irritability and lethargy when they are too hot and have insufficient water. One or more of the following are typically observed with heat stress: increased breathing rate and sweating, increased water intake, decreased feed intake.

[0457] Isolated: The term “isolated” means a substance in a form or environment that does not occur in nature. Non-limiting examples of isolated substances include (1) any non-naturally occurring substance, (2) any substance including, but not limited to, any enzyme, variant, nucleic acid, protein, peptide or cofactor, that is at least partially removed from one or more or all of the naturally occurring constituents with which it is associated in nature; (3) any substance modified by the hand of man relative to that substance found in nature; or (4) any substance modified by increasing the amount of the substance relative to other components with which it is naturally associated (e.g., multiple copies of a gene encoding the substance; use of a stronger promoter than the promoter naturally associated with the gene encoding the substance). An isolated substance may be present in a fermentation broth sample.

[0458] Mature polypeptide: The term “mature polypeptide” means a polypeptide in its final form following translation and any post-translational modifications, such as N-terminal processing, C-terminal truncation, glycosylation, phosphorylation, etc.

[0459] Physical determination of the mature N terminus of SODs was done with Mass Spectrometry. Samples were diluted to 0.1 mg/ml in water. If they were to be deglycosylated before analysis, the samples were suspended in 50 mM Ammonium acetate buffer pH 5.5. The samples are then placed in an Ultimate 3000 UHPLC system (Thermo Scientific) at 8 degrees C. and run over an Advance Bio-RP desalting column (Agilent) The solvents used were A: LC/MS grade water with 0.1% formic acid, solvent: B 95% acetonitrile with 0.1% formic acid. The gradient was 5-80% B over 5 minutes. Post column the protein eluent was analyzed in a Bruker Maxis II mass spectrometer (Bremen Germany) and the resulting trace was analyzed by the supplied Bruker data analysis software. The deconvoluted spectrum was then compared to the calculated molecular weight with the expected N and C terminals using GPMAW (General Protein/Mass Analysis for Windows)software version 12.20. If the values match within 1 Dalton, a match was concluded.

[0460] Nutritional Stress: In pigs, poultry and other animals, symptoms of nutritional stress include impaired growth, immune suppression, reduced gut health, reduced gut integrity, shift in gut microflora and vomiting. In poultry, further symptoms include decreased egg production, decreased hatchability, gizzaed lesions, increased suspectibility to necrotic enteritis.

[0461] Obtained or obtainable from: The term “obtained or obtainable from” means that the polypeptide may be found in an organism from a specific taxonomic rank. In one embodiment, the polypeptide is obtained or obtainable from the kingdom Fungi, wherein the term kingdom is the taxonomic rank. In a preferred embodiment, the polypeptide is obtained or obtainable from the phylum Ascomycota, wherein the term phylum is the taxonomic rank. In another preferred embodiment, the polypeptide is obtained or obtainable from the subphylum Pezizomycotina, wherein the term subphylum is the taxonomic rank. In another preferred embodiment, the polypeptide is obtained or obtainable from the class Eurotiomycetes, wherein the term class is the taxonomic rank.

[0462] If the taxonomic rank of a polypeptide is not known, it can easily be determined by a person skilled in the art by performing a BLASTP search of the polypeptide (using e.g. the National Center for Biotechnology Information (NCIB) website http://www.ncbi.nlm.nih.gov/) and comparing it to the closest homologues. The skilled person can also compare the sequence to those of the application as filed. An unknown polypeptide which is a fragment of a known polypeptide is considered to be of the same taxonomic species. An unknown natural polypeptide or artificial variant which comprises a substitution, deletion and/or insertion in up to 10 positions is considered to be from the same taxonomic species as the known polypeptide.

[0463] Oxidative Stress: The term “oxidative stress” is intended to mean an imbalance between oxidants and reductants (antioxidants) at the cellular or individual level. Oxidative damage is one result of such an imbalance and includes oxidative modification of cellular macromolecules, cell death by apoptosis or necrosis, as well as structural tissue damage by means of reactive oxygen and nitrogen species (ROS, RNS).

[0464] Roughage: The term “roughage” means dry plant material with high levels of fiber, such as fiber, bran, husks from seeds and grains and crop residues (such as stover, copra, straw, chaff, sugar beet waste).

[0465] Secreted Enzyme: A secreted enzyme is an exoenzyme, or extracellular enzyme, in that is is an enzyme that is secreted by a cell and functions outside that cell.

[0466] Sequence identity: The relatedness between two amino acid sequences or between two nucleotide sequences is described by the parameter “sequence identity”.

[0467] For purposes of the present invention, the sequence identity between two amino acid sequences is determined using the Needleman-Wunsch algorithm (Needleman and Wunsch, 1970, J. Mol. Biol. 48: 443-453) as implemented in the Needle program of the EMBOSS package (EMBOSS: The European Molecular Biology Open Software Suite, Rice et aL, 2000, Trends Genet. 16: 276-277), preferably version 5.0.0 or later. The parameters used are gap open penalty of 10, gap extension penalty of 0.5, and the EBLOSUM62 (EMBOSS version of BLOSUM62) substitution matrix. The output of Needle labeled “longest identity” (obtained using the -nobrief option) is used as the percent identity and is calculated as follows:

(Identical Residues×100)/(Length of Alignment−Total Number of Gaps in Alignment)

[0468] Substantially pure polypeptide: The term “substantially pure polypeptide” means a preparation that contains at most 10%, at most 8%, at most 6%, at most 5%, at most 4%, at most 3%, at most 2%, at most 1%, and at most 0.5% by weight of other polypeptide material with which it is natively or recombinantly associated. Preferably, the polypeptide is at least 92% pure, e.g., at least 94% pure, at least 95% pure, at least 96% pure, at least 97% pure, at least 98% pure, at least 99%, at least 99.5% pure, and 100% pure by weight of the total polypeptide material present in the preparation. The polypeptides of the present invention are preferably in a substantially pure form. This can be accomplished, for example, by preparing the polypeptide by well known recombinant methods or by classical purification methods.

[0469] Tm: The term Tm, as used in the Examples refers to the termperature at which 50% of the protein molecules are unfolded and 50% of the protein molecules are folded.

[0470] Variant: The term “variant” means a polypeptide having SOD activity comprising an alteration, i.e., a substitution, insertion, and/or deletion, of one or more (several) amino acid residues at one or more (e.g., several) positions. A substitution means replacement of the amino acid occupying a position with a different amino acid; a deletion means removal of the amino acid occupying a position; and an insertion means adding 1, 2, or 3 amino acids adjacent to and immediately following the amino acid occupying the position.

[0471] In one aspect, a SOD variant may comprise from 1 to 10 alterations, i.e. 1, 2, 3, 4, 5, 6, 7, 8, 9 or 10 alterations and have at least 20%, e.g., at least 40%, at least 50%, at least 60%, at least 70%, at least 80%, at least 90%, at least 95%, or at least 100% of the SOD activity of the parent SOD, such as SEQ ID NO: 1 to 5.

[0472] Nutrient: The term “nutrient” in the present invention means components or elements contained in dietary feed for an animal, including water-soluble ingredients, fat-soluble ingredients and others. The example of water-soluble ingredients includes but is not limited to carbohydrates such as saccharides including glucose, fructose, galactose and starch; minerals such as calcium, magnesium, zinc, phosphorus, potassium, sodium and sulfur; nitrogen source such as amino acids and proteins, vitamins such as vitamin B1, vitamin B2, vitamin B3, vitamin B6, folic acid, vitamin B12, biotin and phatothenic acid. The example of the fat-soluble ingredients includes but is not limited to fats such as fat acids including saturated fatty acids (SFA); mono-unsaturated fatty acids (MUFA) and poly-unsaturated fatty acids (PUFA), fibre, vitamins such as vitamin A, vitamin E and vitamin K.

[0473] The invention is related to the use of one or more polypeptides havin catalase activity in animal feed as defined herein.

### Catalases

[0474] The invention is directed at least in part to novel polypeptides of fungal origin having catalase activity. One aspect of the invention is directed to an isolated polypeptide having catalase activity wherein the polypeptide having catalase activity is selected from the group consisting of: 1

[0475] a. a polypeptide with catalase activity having at least 80%, at least 85%, at least 86%, at least 87%, at least 88%, at least 89%, at least 90%, at least 91%, at least 92%, at least 93%, at least 94%, at least 95%, at least 96%, at least 97%, at least 98%, at least 99%, or 100% sequence identity to SEQ ID NO: 103
[0476] b. a polypeptide with catalase activity having at least 80%, at least 85%, at least 86%, at least 87%, at least 88%, at least 89%, at least 90%, at least 91%, at least 92%, at least 93%, at least 94%, at least 95%, at least 96%, at least 97%, at least 98%, at least 99%, or 100% sequence identity to SEQ ID NO: 104;
[0477] c. a polypeptide with catalase activity having at least 80%, at least 85%, at least 86%, at least 87%, at least 88%, at least 89%, at least 90%, at least 91%, at least 92%, at least 93%, at least 94%, at least 95%, at least 96%, at least 97%, at least 98%, at least 99%, or 100% sequence identity to SEQ ID NO: 105;
[0478] d. a polypeptide with catalase activity having at least 80%, at least 85%, at least 86%, at least 87%, at least 88%, at least 89%, at least 90%, at least 91%, at least 92%, at least 93%, at least 94%, at least 95%, at least 96%, at least 97%, at least 98%, at least 99%, or 100% sequence identity to SEQ ID NO: 106;
[0479] e. a polypeptide with catalase activity having at least 80%, at least 85%, at least 86%, at least 87%, at least 88%, at least 89%, at least 90%, at least 91%, at least 92%, at least 93%, at least 94%, at least 95%, at least 96%, at least 97%, at least 98%, at least 99%, or 100% sequence identity to SEQ ID NO: 107;
[0480] f. a polypeptide with catalase activity having at least 80%, at least 85%, at least 86%, at least 87%, at least 88%, at least 89%, at least 90%, at least 91%, at least 92%, at least 93%, at least 94%, at least 95%, at least 96%, at least 97%, at least 98%, at least 99%, or 100% sequence identity to SEQ ID NO: 108;
[0481] g. a polypeptide with catalase activity having at least 80%, at least 85%, at least 86%, at least 87%, at least 88%, at least 89%, at least 90%, at least 91%, at least 92%, at least 93%, at least 94%, at least 95%, at least 96%, at least 97%, at least 98%, at least 99%, or 100% sequence identity to SEQ ID NO: 109
[0482] h. a polypeptide with catalase activity having at least 80%, at least 85%, at least 86%, at least 87%, at least 88%, at least 89%, at least 90%, at least 91%, at least 92%, at least 93%, at least 94%, at least 95%, at least 96%, at least 97%, at least 98%, at least 99%, or 100% sequence identity to SEQ ID NO: 110
[0483] i. a polypeptide with catalase activity having at least 80%, at least 85%, at least 86%, at least 87%, at least 88%, at least 89%, at least 90%, at least 91%, at least 92%, at least 93%, at least 94%, at least 95%, at least 96%, at least 97%, at least 98%, at least 99%, or 100% sequence identity to SEQ ID NO: 111
[0484] j. a polypeptide with catalase activity having at least 80%, at least 85%, at least 86%, at least 87%, at least 88%, at least 89%, at least 90%, at least 91%, at least 92%, at least 93%, at least 94%, at least 95%, at least 96%, at least 97%, at least 98%, at least 99%, or 100% sequence identity to SEQ ID NO: 112
[0485] k. a polypeptide with catalase activity having at least 80%, at least 85%, at least 86%, at least 87%, at least 88%, at least 89%, at least 90%, at least 91%, at least 92%, at least 93%, at least 94%, at least 95%, at least 96%, at least 97%, at least 98%, at least 99%, or 100% sequence identity to SEQ ID NO: 113
[0486] l. a polypeptide with catalase activity having at least 80%, at least 85%, at least 86%, at least 87%, at least 88%, at least 89%, at least 90%, at least 91%, at least 92%, at least 93%, at least 94%, at least 95%, at least 96%, at least 97%, at least 98%, at least 99%, or 100% sequence identity to SEQ ID NO: 114
[0487] m. a polypeptide with catalase activity having at least 80%, at least 85%, at least 86%, at least 87%, at least 88%, at least 89%, at least 90%, at least 91%, at least 92%, at least 93%, at least 94%, at least 95%, at least 96%, at least 97%, at least 98%, at least 99%, or 100% sequence identity to SEQ ID NO: 115
[0488] n. a polypeptide with catalase activity having at least 80%, at least 85%, at least 86%, at least 87%, at least 88%, at least 89%, at least 90%, at least 91%, at least 92%, at least 93%, at least 94%, at least 95%, at least 96%, at least 97%, at least 98%, at least 99%, or 100% sequence identity to SEQ ID NO: 116
[0489] o. a polypeptide with catalase activity having at least 80%, at least 85%, at least 86%, at least 87%, at least 88%, at least 89%, at least 90%, at least 91%, at least 92%, at least 93%, at least 94%, at least 95%, at least 96%, at least 97%, at least 98%, at least 99%, or 100% sequence identity to SEQ ID NO: 117
[0490] p. a polypeptide with catalase activity having at least 80%, at least 85%, at least 86%, at least 87%, at least 88%, at least 89%, at least 90%, at least 91%, at least 92%, at least 93%, at least 94%, at least 95%, at least 96%, at least 97%, at least 98%, at least 99%, or 100% sequence identity to SEQ ID NO: 118
[0491] q. a polypeptide with catalase activity having at least 80%, at least 85%, at least 86%, at least 87%, at least 88%, at least 89%, at least 90%, at least 91%, at least 92%, at least 93%, at least 94%, at least 95%, at least 96%, at least 97%, at least 98%, at least 99%, or 100% sequence identity to SEQ ID NO: 119
[0492] r. a polypeptide with catalase activity having at least 80%, at least 85%, at least 86%, at least 87%, at least 88%, at least 89%, at least 90%, at least 91%, at least 92%, at least 93%, at least 94%, at least 95%, at least 96%, at least 97%, at least 98%, at least 99%, or 100% sequence identity to SEQ ID NO: 120
[0493] s. a polypeptide with catalase activity having at least 80%, at least 85%, at least 86%, at least 87%, at least 88%, at least 89%, at least 90%, at least 91%, at least 92%, at least 93%, at least 94%, at least 95%, at least 96%, at least 97%, at least 98%, at least 99%, or 100% sequence identity to SEQ ID NO: 121
[0494] t. a polypeptide with catalase activity having at least 80%, at least 85%, at least 86%, at least 87%, at least 88%, at least 89%, at least 90%, at least 91%, at least 92%, at least 93%, at least 94%, at least 95%, at least 96%, at least 97%, at least 98%, at least 99%, or 100% sequence identity to SEQ ID NO: 122
[0495] u. a polypeptide with catalase activity having at least 80%, at least 85%, at least 86%, at least 87%, at least 88%, at least 89%, at least 90%, at least 91%, at least 92%, at least 93%, at least 94%, at least 95%, at least 96%, at least 97%, at least 98%, at least 99%, or 100% sequence identity to SEQ ID NO: 123
[0496] v. a polypeptide with catalase activity having at least 80%, at least 85%, at least 86%, at least 87%, at least 88%, at least 89%, at least 90%, at least 91%, at least 92%, at least 93%, at least 94%, at least 95%, at least 96%, at least 97%, at least 98%, at least 99%, or 100% sequence identity to SEQ ID NO: 124
[0497] w. a polypeptide with catalase activity having at least 80%, at least 85%, at least 86%, at least 87%, at least 88%, at least 89%, at least 90%, at least 91%, at least 92%, at least 93%, at least 94%, at least 95%, at least 96%, at least 97%, at least 98%, at least 99%, or 100% sequence identity to SEQ ID NO: 125
[0498] x. a polypeptide with catalase activity having at least 80%, at least 85%, at least 86%, at least 87%, at least 88%, at least 89%, at least 90%, at least 91%, at least 92%, at least 93%, at least 94%, at least 95%, at least 96%, at least 97%, at least 98%, at least 99%, or 100% sequence identity to SEQ ID NO: 126;
[0499] y. a polypeptide with catalase activity having at least 80%, at least 85%, at least 86%, at least 87%, at least 88%, at least 89%, at least 90%, at least 91%, at least 92%, at least 93%, at least 94%, at least 95%, at least 96%, at least 97%, at least 98%, at least 99%, or 100% sequence identity to SEQ ID NO: 250;
[0500] z. a polypeptide with catalase activity having at least 80%, at least 85%, at least 86%, at least 87%, at least 88%, at least 89%, at least 90%, at least 91%, at least 92%, at least 93%, at least 94%, at least 95%, at least 96%, at least 97%, at least 98%, at least 99%, or 100% sequence identity to SEQ ID NO 151;
[0501] aa. a polypeptide with catalase activity having at least 80%, at least 85%, at least 86%, at least 87%, at least 88%, at least 89%, at least 90%, at least 91%, at least 92%, at least 93%, at least 94%, at least 95%, at least 96%, at least 97%, at least 98%, at least 99%, or 100% sequence identity to SEQ ID NO 152;
[0502] bb. a polypeptide with catalase activity having at least 80%, at least 85%, at least 86%, at least 87%, at least 88%, at least 89%, at least 90%, at least 91%, at least 92%, at least 93%, at least 94%, at least 95%, at least 96%, at least 97%, at least 98%, at least 99%, or 100% sequence identity to SEQ ID NO 153;
[0503] cc. a polypeptide with catalase activity having at least 80%, at least 85%, at least 86%, at least 87%, at least 88%, at least 89%, at least 90%, at least 91%, at least 92%, at least 93%, at least 94%, at least 95%, at least 96%, at least 97%, at least 98%, at least 99%, or 100% sequence identity to SEQ ID NO 154;
[0504] dd. a polypeptide with catalase activity having at least 80%, at least 85%, at least 86%, at least 87%, at least 88%, at least 89%, at least 90%, at least 91%, at least 92%, at least 93%, at least 94%, at least 95%, at least 96%, at least 97%, at least 98%, at least 99%, or 100% sequence identity to SEQ ID NO 155;
[0505] ee. a polypeptide with catalase activity having at least 80%, at least 85%, at least 86%, at least 87%, at least 88%, at least 89%, at least 90%, at least 91%, at least 92%, at least 93%, at least 94%, at least 95%, at least 96%, at least 97%, at least 98%, at least 99%, or 100% sequence identity to SEQ ID NO 156;
[0506] ff. a polypeptide with catalase activity having at least 80%, at least 85%, at least 86%, at least 87%, at least 88%, at least 89%, at least 90%, at least 91%, at least 92%, at least 93%, at least 94%, at least 95%, at least 96%, at least 97%, at least 98%, at least 99%, or 100% sequence identity to SEQ ID NO 157;
[0507] gg. a polypeptide with catalase activity having at least 80%, at least 85%, at least 86%, at least 87%, at least 88%, at least 89%, at least 90%, at least 91%, at least 92%, at least 93%, at least 94%, at least 95%, at least 96%, at least 97%, at least 98%, at least 99%, or 100% sequence identity to SEQ ID NO 158;
[0508] hh. a polypeptide with catalase activity having at least 80%, at least 85%, at least 86%, at least 87%, at least 88%, at least 89%, at least 90%, at least 91%, at least 92%, at least 93%, at least 94%, at least 95%, at least 96%, at least 97%, at least 98%, at least 99%, or 100% sequence identity to SEQ ID NO 159;
[0509] ii. a polypeptide with catalase activity having at least 80%, at least 85%, at least 86%, at least 87%, at least 88%, at least 89%, at least 90%, at least 91%, at least 92%, at least 93%, at least 94%, at least 95%, at least 96%, at least 97%, at least 98%, at least 99%, or 100% sequence identity to SEQ ID NO 160;
[0510] jj. a polypeptide with catalase activity having at least 80%, at least 85%, at least 86%, at least 87%, at least 88%, at least 89%, at least 90%, at least 91%, at least 92%, at least 93%, at least 94%, at least 95%, at least 96%, at least 97%, at least 98%, at least 99%, or 100% sequence identity to SEQ ID NO 161;
[0511] kk. a polypeptide with catalase activity having at least 80%, at least 85%, at least 86%, at least 87%, at least 88%, at least 89%, at least 90%, at least 91%, at least 92%, at least 93%, at least 94%, at least 95%, at least 96%, at least 97%, at least 98%, at least 99%, or 100% sequence identity to SEQ ID NO 162;
[0512] ll. a polypeptide with catalase activity having at least 80%, at least 85%, at least 86%, at least 87%, at least 88%, at least 89%, at least 90%, at least 91%, at least 92%, at least 93%, at least 94%, at least 95%, at least 96%, at least 97%, at least 98%, at least 99%, or 100% sequence identity to SEQ ID NO 163;
[0513] mm. a polypeptide with catalase activity having at least 80%, at least 85%, at least 86%, at least 87%, at least 88%, at least 89%, at least 90%, at least 91%, at least 92%, at least 93%, at least 94%, at least 95%, at least 96%, at least 97%, at least 98%, at least 99%, or 100% sequence identity to SEQ ID NO 164;
[0514] nn. a polypeptide with catalase activity having at least 80%, at least 85%, at least 86%, at least 87%, at least 88%, at least 89%, at least 90%, at least 91%, at least 92%, at least 93%, at least 94%, at least 95%, at least 96%, at least 97%, at least 98%, at least 99%, or 100% sequence identity to SEQ ID NO 165;
[0515] oo. a polypeptide with catalase activity having at least 80%, at least 85%, at least 86%, at least 87%, at least 88%, at least 89%, at least 90%, at least 91%, at least 92%, at least 93%, at least 94%, at least 95%, at least 96%, at least 97%, at least 98%, at least 99%, or 100% sequence identity to SEQ ID NO 166;
[0516] pp. a polypeptide with catalase activity having at least 80%, at least 85%, at least 86%, at least 87%, at least 88%, at least 89%, at least 90%, at least 91%, at least 92%, at least 93%, at least 94%, at least 95%, at least 96%, at least 97%, at least 98%, at least 99%, or 100% sequence identity to SEQ ID NO 167;
[0517] qq. a polypeptide with catalase activity having at least 80%, at least 85%, at least 86%, at least 87%, at least 88%, at least 89%, at least 90%, at least 91%, at least 92%, at least 93%, at least 94%, at least 95%, at least 96%, at least 97%, at least 98%, at least 99%, or 100% sequence identity to SEQ ID NO 168;
[0518] rr. a polypeptide with catalase activity having at least 80%, at least 85%, at least 86%, at least 87%, at least 88%, at least 89%, at least 90%, at least 91%, at least 92%, at least 93%, at least 94%, at least 95%, at least 96%, at least 97%, at least 98%, at least 99%, or 100% sequence identity to SEQ ID NO 169;
[0519] ss. a polypeptide with catalase activity having at least 80%, at least 85%, at least 86%, at least 87%, at least 88%, at least 89%, at least 90%, at least 91%, at least 92%, at least 93%, at least 94%, at least 95%, at least 96%, at least 97%, at least 98%, at least 99%, or 100% sequence identity to SEQ ID NO 170;
[0520] tt. a polypeptide with catalase activity having at least 80%, at least 85%, at least 86%, at least 87%, at least 88%, at least 89%, at least 90%, at least 91%, at least 92%, at least 93%, at least 94%, at least 95%, at least 96%, at least 97%, at least 98%, at least 99%, or 100% sequence identity to SEQ ID NO 171;
[0521] uu. a polypeptide with catalase activity having at least 80%, at least 85%, at least 86%, at least 87%, at least 88%, at least 89%, at least 90%, at least 91%, at least 92%, at least 93%, at least 94%, at least 95%, at least 96%, at least 97%, at least 98%, at least 99%, or 100% sequence identity to SEQ ID NO 172;
[0522] vv. a polypeptide with catalase activity having at least 80%, at least 85%, at least 86%, at least 87%, at least 88%, at least 89%, at least 90%, at least 91%, at least 92%, at least 93%, at least 94%, at least 95%, at least 96%, at least 97%, at least 98%, at least 99%, or 100% sequence identity to SEQ ID NO 173; and
[0523] ww. a polypeptide with catalase activity having at least 80%, at least 85%, at least 86%, at least 87%, at least 88%, at least 89%, at least 90%, at least 91%, at least 92%, at least 93%, at least 94%, at least 95%, at least 96%, at least 97%, at least 98%, at least 99%, or 100% sequence identity to SEQ ID NO 174;

### Sequences of Catalases

[0524] In a preferred embodiment, the method of the invention and the animal feed additive of the invention comprise a polypeptide having catalase activity wherein the polypeptide having catalase activity is selected from the group consisting of:
[0525] a. a polypeptide with catalase activity having at least 80%, at least 85%, at least 86%, at least 87%, at least 88%, at least 89%, at least 90%, at least 91%, at least 92%, at least 93%, at least 94%, at least 95%, at least 96%, at least 97%, at least 98%, at least 99%, or 100% sequence identity to SEQ ID NO: 6; and
[0526] b. a polypeptide with catalase activity having at least 80%, at least 85%, at least 86%, at least 87%, at least 88%, at least 89%, at least 90%, at least 91%, at least 92%, at least 93%, at least 94%, at least 95%, at least 96%, at least 97%, at least 98%, at least 99%, or 100% sequence identity to SEQ ID NO: 7
[0527] c. a polypeptide with catalase activity having at least 80%, at least 85%, at least 86%, at least 87%, at least 88%, at least 89%, at least 90%, at least 91%, at least 92%, at least 93%, at least 94%, at least 95%, at least 96%, at least 97%, at least 98%, at least 99%, or 100% sequence identity to SEQ ID NO: 103
[0528] d. a polypeptide with catalase activity having at least 80%, at least 85%, at least 86%, at least 87%, at least 88%, at least 89%, at least 90%, at least 91%, at least 92%, at least 93%, at least 94%, at least 95%, at least 96%, at least 97%, at least 98%, at least 99%, or 100% sequence identity to SEQ ID NO: 104;
[0529] e. a polypeptide with catalase activity having at least 80%, at least 85%, at least 86%, at least 87%, at least 88%, at least 89%, at least 90%, at least 91%, at least 92%, at least 93%, at least 94%, at least 95%, at least 96%, at least 97%, at least 98%, at least 99%, or 100% sequence identity to SEQ ID NO: 105;
[0530] f. a polypeptide with catalase activity having at least 80%, at least 85%, at least 86%, at least 87%, at least 88%, at least 89%, at least 90%, at least 91%, at least 92%, at least 93%, at least 94%, at least 95%, at least 96%, at least 97%, at least 98%, at least 99%, or 100% sequence identity to SEQ ID NO: 106;
[0531] g. a polypeptide with catalase activity having at least 80%, at least 85%, at least 86%, at least 87%, at least 88%, at least 89%, at least 90%, at least 91%, at least 92%, at least 93%, at least 94%, at least 95%, at least 96%, at least 97%, at least 98%, at least 99%, or 100% sequence identity to SEQ ID NO: 107;
[0532] h. a polypeptide with catalase activity having at least 80%, at least 85%, at least 86%, at least 87%, at least 88%, at least 89%, at least 90%, at least 91%, at least 92%, at least 93%, at least 94%, at least 95%, at least 96%, at least 97%, at least 98%, at least 99%, or 100% sequence identity to SEQ ID NO: 108;
[0533] i. a polypeptide with catalase activity having at least 80%, at least 85%, at least 86%, at least 87%, at least 88%, at least 89%, at least 90%, at least 91%, at least 92%, at least 93%, at least 94%, at least 95%, at least 96%, at least 97%, at least 98%, at least 99%, or 100% sequence identity to SEQ ID NO: 109
[0534] j. a polypeptide with catalase activity having at least 80%, at least 85%, at least 86%, at least 87%, at least 88%, at least 89%, at least 90%, at least 91%, at least 92%, at least 93%, at least 94%, at least 95%, at least 96%, at least 97%, at least 98%, at least 99%, or 100% sequence identity to SEQ ID NO: 110
[0535] k. a polypeptide with catalase activity having at least 80%, at least 85%, at least 86%, at least 87%, at least 88%, at least 89%, at least 90%, at least 91%, at least 92%, at least 93%, at least 94%, at least 95%, at least 96%, at least 97%, at least 98%, at least 99%, or 100% sequence identity to SEQ ID NO: 111
[0536] l. a polypeptide with catalase activity having at least 80%, at least 85%, at least 86%, at least 87%, at least 88%, at least 89%, at least 90%, at least 91%, at least 92%, at least 93%, at least 94%, at least 95%, at least 96%, at least 97%, at least 98%, at least 99%, or 100% sequence identity to SEQ ID NO: 112
[0537] m. a polypeptide with catalase activity having at least 80%, at least 85%, at least 86%, at least 87%, at least 88%, at least 89%, at least 90%, at least 91%, at least 92%, at least 93%, at least 94%, at least 95%, at least 96%, at least 97%, at least 98%, at least 99%, or 100% sequence identity to SEQ ID NO: 113
[0538] n. a polypeptide with catalase activity having at least 80%, at least 85%, at least 86%, at least 87%, at least 88%, at least 89%, at least 90%, at least 91%, at least 92%, at least 93%, at least 94%, at least 95%, at least 96%, at least 97%, at least 98%, at least 99%, or 100% sequence identity to SEQ ID NO: 114
[0539] o. a polypeptide with catalase activity having at least 80%, at least 85%, at least 86%, at least 87%, at least 88%, at least 89%, at least 90%, at least 91%, at least 92%, at least 93%, at least 94%, at least 95%, at least 96%, at least 97%, at least 98%, at least 99%, or 100% sequence identity to SEQ ID NO: 115
[0540] p. a polypeptide with catalase activity having at least 80%, at least 85%, at least 86%, at least 87%, at least 88%, at least 89%, at least 90%, at least 91%, at least 92%, at least 93%, at least 94%, at least 95%, at least 96%, at least 97%, at least 98%, at least 99%, or 100% sequence identity to SEQ ID NO: 116
[0541] q. a polypeptide with catalase activity having at least 80%, at least 85%, at least 86%, at least 87%, at least 88%, at least 89%, at least 90%, at least 91%, at least 92%, at least 93%, at least 94%, at least 95%, at least 96%, at least 97%, at least 98%, at least 99%, or 100% sequence identity to SEQ ID NO: 117
[0542] r. a polypeptide with catalase activity having at least 80%, at least 85%, at least 86%, at least 87%, at least 88%, at least 89%, at least 90%, at least 91%, at least 92%, at least 93%, at least 94%, at least 95%, at least 96%, at least 97%, at least 98%, at least 99%, or 100% sequence identity to SEQ ID NO: 118
[0543] s. a polypeptide with catalase activity having at least 80%, at least 85%, at least 86%, at least 87%, at least 88%, at least 89%, at least 90%, at least 91%, at least 92%, at least 93%, at least 94%, at least 95%, at least 96%, at least 97%, at least 98%, at least 99%, or 100% sequence identity to SEQ ID NO: 119
[0544] t. a polypeptide with catalase activity having at least 80%, at least 85%, at least 86%, at least 87%, at least 88%, at least 89%, at least 90%, at least 91%, at least 92%, at least 93%, at least 94%, at least 95%, at least 96%, at least 97%, at least 98%, at least 99%, or 100% sequence identity to SEQ ID NO: 120
[0545] u. a polypeptide with catalase activity having at least 80%, at least 85%, at least 86%, at least 87%, at least 88%, at least 89%, at least 90%, at least 91%, at least 92%, at least 93%, at least 94%, at least 95%, at least 96%, at least 97%, at least 98%, at least 99%, or 100% sequence identity to SEQ ID NO: 121
[0546] v. a polypeptide with catalase activity having at least 80%, at least 85%, at least 86%, at least 87%, at least 88%, at least 89%, at least 90%, at least 91%, at least 92%, at least 93%, at least 94%, at least 95%, at least 96%, at least 97%, at least 98%, at least 99%, or 100% sequence identity to SEQ ID NO: 122
[0547] w. a polypeptide with catalase activity having at least 80%, at least 85%, at least 86%, at least 87%, at least 88%, at least 89%, at least 90%, at least 91%, at least 92%, at least 93%, at least 94%, at least 95%, at least 96%, at least 97%, at least 98%, at least 99%, or 100% sequence identity to SEQ ID NO: 123
[0548] x. a polypeptide with catalase activity having at least 80%, at least 85%, at least 86%, at least 87%, at least 88%, at least 89%, at least 90%, at least 91%, at least 92%, at least 93%, at least 94%, at least 95%, at least 96%, at least 97%, at least 98%, at least 99%, or 100% sequence identity to SEQ ID NO: 124
[0549] y. a polypeptide with catalase activity having at least 80%, at least 85%, at least 86%, at least 87%, at least 88%, at least 89%, at least 90%, at least 91%, at least 92%, at least 93%, at least 94%, at least 95%, at least 96%, at least 97%, at least 98%, at least 99%, or 100% sequence identity to SEQ ID NO: 125
[0550] z. a polypeptide with catalase activity having at least 80%, at least 85%, at least 86%, at least 87%, at least 88%, at least 89%, at least 90%, at least 91%, at least 92%, at least 93%, at least 94%, at least 95%, at least 96%, at least 97%, at least 98%, at least 99%, or 100% sequence identity to SEQ ID NO: 126;
[0551] aa. a polypeptide with catalase activity having at least 80%, at least 85%, at least 86%, at least 87%, at least 88%, at least 89%, at least 90%, at least 91%, at least 92%, at least 93%, at least 94%, at least 95%, at least 96%, at least 97%, at least 98%, at least 99%, or 100% sequence identity to SEQ ID NO: 250;
[0552] bb. a polypeptide with catalase activity having at least 80%, at least 85%, at least 86%, at least 87%, at least 88%, at least 89%, at least 90%, at least 91%, at least 92%, at least 93%, at least 94%, at least 95%, at least 96%, at least 97%, at least 98%, at least 99%, or 100% sequence identity to SEQ ID NO 151;
[0553] cc. a polypeptide with catalase activity having at least 80%, at least 85%, at least 86%, at least 87%, at least 88%, at least 89%, at least 90%, at least 91%, at least 92%, at least 93%, at least 94%, at least 95%, at least 96%, at least 97%, at least 98%, at least 99%, or 100% sequence identity to SEQ ID NO 152;
[0554] dd. a polypeptide with catalase activity having at least 80%, at least 85%, at least 86%, at least 87%, at least 88%, at least 89%, at least 90%, at least 91%, at least 92%, at least 93%, at least 94%, at least 95%, at least 96%, at least 97%, at least 98%, at least 99%, or 100% sequence identity to SEQ ID NO 153;
[0555] ee. a polypeptide with catalase activity having at least 80%, at least 85%, at least 86%, at least 87%, at least 88%, at least 89%, at least 90%, at least 91%, at least 92%, at least 93%, at least 94%, at least 95%, at least 96%, at least 97%, at least 98%, at least 99%, or 100% sequence identity to SEQ ID NO 154;
[0556] ff. a polypeptide with catalase activity having at least 80%, at least 85%, at least 86%, at least 87%, at least 88%, at least 89%, at least 90%, at least 91%, at least 92%, at least 93%, at least 94%, at least 95%, at least 96%, at least 97%, at least 98%, at least 99%, or 100% sequence identity to SEQ ID NO 155;
[0557] gg. a polypeptide with catalase activity having at least 80%, at least 85%, at least 86%, at least 87%, at least 88%, at least 89%, at least 90%, at least 91%, at least 92%, at least 93%, at least 94%, at least 95%, at least 96%, at least 97%, at least 98%, at least 99%, or 100% sequence identity to SEQ ID NO 156;
[0558] hh. a polypeptide with catalase activity having at least 80%, at least 85%, at least 86%, at least 87%, at least 88%, at least 89%, at least 90%, at least 91%, at least 92%, at least 93%, at least 94%, at least 95%, at least 96%, at least 97%, at least 98%, at least 99%, or 100% sequence identity to SEQ ID NO 157;
[0559] ii. a polypeptide with catalase activity having at least 80%, at least 85%, at least 86%, at least 87%, at least 88%, at least 89%, at least 90%, at least 91%, at least 92%, at least 93%, at least 94%, at least 95%, at least 96%, at least 97%, at least 98%, at least 99%, or 100% sequence identity to SEQ ID NO 158;
[0560] jj. a polypeptide with catalase activity having at least 80%, at least 85%, at least 86%, at least 87%, at least 88%, at least 89%, at least 90%, at least 91%, at least 92%, at least 93%, at least 94%, at least 95%, at least 96%, at least 97%, at least 98%, at least 99%, or 100% sequence identity to SEQ ID NO 159;
[0561] kk. a polypeptide with catalase activity having at least 80%, at least 85%, at least 86%, at least 87%, at least 88%, at least 89%, at least 90%, at least 91%, at least 92%, at least 93%, at least 94%, at least 95%, at least 96%, at least 97%, at least 98%, at least 99%, or 100% sequence identity to SEQ ID NO 160;
[0562] ll. a polypeptide with catalase activity having at least 80%, at least 85%, at least 86%, at least 87%, at least 88%, at least 89%, at least 90%, at least 91%, at least 92%, at least 93%, at least 94%, at least 95%, at least 96%, at least 97%, at least 98%, at least 99%, or 100% sequence identity to SEQ ID NO 161;
[0563] mm. a polypeptide with catalase activity having at least 80%, at least 85%, at least 86%, at least 87%, at least 88%, at least 89%, at least 90%, at least 91%, at least 92%, at least 93%, at least 94%, at least 95%, at least 96%, at least 97%, at least 98%, at least 99%, or 100% sequence identity to SEQ ID NO 162;
[0564] nn. a polypeptide with catalase activity having at least 80%, at least 85%, at least 86%, at least 87%, at least 88%, at least 89%, at least 90%, at least 91%, at least 92%, at least 93%, at least 94%, at least 95%, at least 96%, at least 97%, at least 98%, at least 99%, or 100% sequence identity to SEQ ID NO 163;
[0565] oo. a polypeptide with catalase activity having at least 80%, at least 85%, at least 86%, at least 87%, at least 88%, at least 89%, at least 90%, at least 91%, at least 92%, at least 93%, at least 94%, at least 95%, at least 96%, at least 97%, at least 98%, at least 99%, or 100% sequence identity to SEQ ID NO 164;
[0566] pp. a polypeptide with catalase activity having at least 80%, at least 85%, at least 86%, at least 87%, at least 88%, at least 89%, at least 90%, at least 91%, at least 92%, at least 93%, at least 94%, at least 95%, at least 96%, at least 97%, at least 98%, at least 99%, or 100% sequence identity to SEQ ID NO 165;
[0567] qq. a polypeptide with catalase activity having at least 80%, at least 85%, at least 86%, at least 87%, at least 88%, at least 89%, at least 90%, at least 91%, at least 92%, at least 93%, at least 94%, at least 95%, at least 96%, at least 97%, at least 98%, at least 99%, or 100% sequence identity to SEQ ID NO 166;
[0568] rr. a polypeptide with catalase activity having at least 80%, at least 85%, at least 86%, at least 87%, at least 88%, at least 89%, at least 90%, at least 91%, at least 92%, at least 93%, at least 94%, at least 95%, at least 96%, at least 97%, at least 98%, at least 99%, or 100% sequence identity to SEQ ID NO 167;
[0569] ss. a polypeptide with catalase activity having at least 80%, at least 85%, at least 86%, at least 87%, at least 88%, at least 89%, at least 90%, at least 91%, at least 92%, at least 93%, at least 94%, at least 95%, at least 96%, at least 97%, at least 98%, at least 99%, or 100% sequence identity to SEQ ID NO 168;
[0570] tt. a polypeptide with catalase activity having at least 80%, at least 85%, at least 86%, at least 87%, at least 88%, at least 89%, at least 90%, at least 91%, at least 92%, at least 93%, at least 94%, at least 95%, at least 96%, at least 97%, at least 98%, at least 99%, or 100% sequence identity to SEQ ID NO 169;
[0571] uu. a polypeptide with catalase activity having at least 80%, at least 85%, at least 86%, at least 87%, at least 88%, at least 89%, at least 90%, at least 91%, at least 92%, at least 93%, at least 94%, at least 95%, at least 96%, at least 97%, at least 98%, at least 99%, or 100% sequence identity to SEQ ID NO 170;
[0572] vv. a polypeptide with catalase activity having at least 80%, at least 85%, at least 86%, at least 87%, at least 88%, at least 89%, at least 90%, at least 91%, at least 92%, at least 93%, at least 94%, at least 95%, at least 96%, at least 97%, at least 98%, at least 99%, or 100% sequence identity to SEQ ID NO 171;
[0573] ww. a polypeptide with catalase activity having at least 80%, at least 85%, at least 86%, at least 87%, at least 88%, at least 89%, at least 90%, at least 91%, at least 92%, at least 93%, at least 94%, at least 95%, at least 96%, at least 97%, at least 98%, at least 99%, or 100% sequence identity to SEQ ID NO 172;
[0574] xx. a polypeptide with catalase activity having at least 80%, at least 85%, at least 86%, at least 87%, at least 88%, at least 89%, at least 90%, at least 91%, at least 92%, at least 93%, at least 94%, at least 95%, at least 96%, at least 97%, at least 98%, at least 99%, or 100% sequence identity to SEQ ID NO 173;
[0575] yy. a polypeptide with catalase activity having at least 80%, at least 85%, at least 86%, at least 87%, at least 88%, at least 89%, at least 90%, at least 91%, at least 92%, at least 93%, at least 94%, at least 95%, at least 96%, at least 97%, at least 98%, at least 99%, or 100% sequence identity to SEQ ID NO 174;
[0576] zz. a polypeptide with catalase activity having at least 80%, at least 85%, at least 86%, at least 87%, at least 88%, at least 89%, at least 90%, at least 91%, at least 92%, at least 93%, at least 94%, at least 95%, at least 96%, at least 97%, at least 98%, at least 99%, or 100% sequence identity to SEQ ID NO 250; and
[0577] aaa. a polypeptide with catalase activity having at least 80%, at least 85%, at least 86%, at least 87%, at least 88%, at least 89%, at least 90%, at least 91%, at least 92%, at least 93%, at least 94%, at least 95%, at least 96%, at least 97%, at least 98%, at least 99%, or 100% sequence identity to SEQ ID NO 251.
   Sources of catalases

[0578] SEQ ID NO 6 and SEQ ID NO 7 are polypeptide having catalase activity available from Aspergillus niger. SEQ ID NO 7 is sold under the tradename Catazyme™. SEQ ID NO: 103 is a polypeptide having catalase activity available from Thermoascus aurantiacus. SEQ ID NO: 104 is a polypeptide having catalase activity available from Aspergillus lentulus. SEQ ID NO: 105 is a polypeptide having catalase activity available from Talaromyces stipitatus. SEQ ID NO: 106 is a polypeptide having catalase activity available from Malbranchea cinnamomea. SEQ ID NO: 107 is a polypeptide having catalase activity available from Crassicarpon thermophilum. SEQ ID NO: 108 is a polypeptide having catalase activity available from Penicillium emersonii. SEQ ID NO: 109 is a polypeptide having catalase activity available from Aspergillus versicolor. SEQ ID NO: 110 is a polypeptide having catalase activity available from Thermomucor indicae-seudaticae. SEQ ID NO: 111 is a polypeptide having catalase activity available from Aspergillus fumigatus. SEQ ID NO: 112 is a polypeptide having catalase activity available from Thermothelomyces thermophilus. SEQ ID NO: 113 is a polypeptide having catalase activity available from Curvularia verruculosa. SEQ ID NO: 114 is a polypeptide having catalase activity available from Mycothermus thermophilus. SEQ ID NO: 115 is a polypeptide having catalase activity available from Mycothermus thermophilus. SEQ ID NO: 116 is a polypeptide having catalase activity available from Penicillium oxalicum. SEQ ID NO: 117 is a polypeptide having catalase activity available from Humicola hyalothermophila. SEQ ID NO: 118 is a polypeptide having catalase activity available from Thermoascus crustaceus. SEQ ID NO: 119 is a polypeptide having catalase activity available from Thielavia australiensis. SEQ ID NO: 120 is a polypeptide having catalase activity available from Thielavia hyrcaniae. SEQ ID NO: 121 is a polypeptide having catalase activity available from Neurospora crassa. SEQ ID NO: 122 is a polypeptide having catalase activity available from Thermoascus aurantiacus. SEQ ID NO: 123 is a polypeptide having catalase activity available from Neurospora crassa. SEQ ID NO: 124 is a polypeptide having catalase activity available from Thermoascus aurantiacus. SEQ ID NO: 125 is a polypeptide having catalase activity available from Thermoascus aurantiacus. SEQ ID NO: 126 is a polypeptide having catalase activity available from Thermoascus aurantiacus. Accordingly, the catalase of the invention may be selected from a polypeptide having catalase activity and obtained from, obtainable from, or derivable from a source selected from the group consisting of Aspergillus niger, Thermoascus aurantiacus, Aspergillus lentulus, Scytalidium thermophilum, Talaromyces stipitatus, Malbranchea cinnamomea, Crassicarpon thermophilum, Penicillium emersonii, Aspergillus versicolor, Thermomucor indicae-seudaticae, Aspergillus fumigatus, Thermothelomyces thermophilus, Curvularia verruculosa, Mycothermus thermophilus, Penicillium oxalicum, Humicola hyalothermophila, Thermoascus crustaceus, Thielavia australiensis, Thielavia hyrcaniae and Neurospora crassa.

[0579] In a preferred embodiment, the animal feed additive or additive comprises a catalase is selected from the group consisting of a catalase obtained from, obtainable from, or derivable from a source selected from the group consisting of Aspergillus niger, Scytalidium thermophilum and Thermoascus aurantiacus, more preferably from Aspergillus niger and Thermoascus aurantiacus

### Thermal Stability of Catalases

[0580] An aspect of the invention is directed to an animal feed additive comprising a catalase wherein the catalase is thermal stable such that it retains at least 40% of its activity when measured at 50 ° C. and pH 7 such as retaining at least 50% activity, such as retaining at least 55% activity, such as retaining at least 60% activity, such as retaining at least 65% activity, such as retaining at least 70% activity, such as retaining at least 75% activity, such as retaining at least 80% activity.

[0581] An aspect of the invention is directed to an animal feed additive comprising a catalase wherein the catalase is thermal stable such that it retains at least 50% of its activity when measured at 40 ° C. at pH 7 such as retaining at least 55% activity, such as retaining at least 60% activity, such as retaining at least 65% activity, such as retaining at least 70% activity, such as retaining at least 75% activity, such as retaining at least 80% activity.

Thermal Stability at different pHs

| | Mature | | | | | | | | |
|---|---|---|---|---|---|---|---|---|---|
| | SEQ ID | Tₘ | | | | | | | |
| Source | NO | 3 | 4 | 5 | 6 | 7 | 8 | 9 | 10 |
| Thermoascus | SEQ ID | 58.5 | 70.2 | 80.1 | 82.1 | 84.0 | 83.8 | 77.9 | 79.9 |
| aurantiacus | NO 250 | | | | | | | | |
| Aspergillus | SEQ ID | 56.0 | 68.2 | 72.2 | 72.3 | 70.2 | 67.0 | 65.7 | 66.1 |
| niger | NO 7 | | | | | | | | |
| Thermoascus | SEQ ID | 67.1 | 75.7 | 79.9 | 80.7 | 79.7 | 79.9 | 78.8 | 71.0 |
| aurantiacus | NO 251 | | | | | | | | |
| Talaromyces | SEQ ID | na | na | na | na | 41.8 | 41.9 | 42.6 | 42.6 |
| stipitatus | NO 105 | | | | | | | | |
| Talaromyces | SEQ ID | na | na | na | 45.3 | 50.4 | 50.4 | 50.2 | 50.0 |
| emersonii | NO 108 | | | | | | | | |
| Penicillium | SEQ ID | na | 51.9 | 59.6 | 63.6 | 73.8 | 65.7 | 63.1 | 57.1 |
| oxalicum | NO 116 | | | | | | | | |
| Thermoascus | SEQ ID | 52.8 | 57.7 | 59.7 | 59.2 | 55.4 | 53.7 | 53.1 | 52.3 |
| crustaceus | NO 118 | | | | | | | | |
| Thermothelomyces | SEQ ID | na | na | na | na | na | 60.1 | 60.6 | na |
| thermophilus | NO 112 | | | | | | | | |
| Scytalidium | Note A | 78.3 | >95 | >95 | >95 | >95 | 89.8 | 86.0 | 78.7 |
| thermophilum | | | | | | | | | |
| Curvularia | SEQ ID | 44.8 | 57.3 | 60.4 | 59.8 | 57.8 | 57 | 54.2 | 49.1 |
| verruculosa | NO 113 | | | | | | | | |
| Aspergillus | SEQ ID | na | na | 60.3 | 61.7 | 63 | na | 62.1 | 55.3 |
| oryzae | NO 115 | | | | | | | | |
| Aspergillus | SEQ ID | na | 66.5 | na | na | 85.1 | na | 72.6 | 73.4 |
| lentulus | NO 104 | | | | | | | | |
| Aspergillus | SEQ ID | na | na | na | na | 83.7 | 82.1 | 78.6 | 73.1 |
| fumigatus | NO 111 | | | | | | | | |
| Neurospora | SEQ ID | na | na | na | na | 67.6 | 61.5 | 61.7 | na |
| crassa | NO 123 | | | | | | | | |
| Neurospora | SEQ ID | na | na | na | 9.5 | 81.8 | 81.2 | 80.5 | na |
| crassa | NO 121 | | | | | | | | |
| Malbranchea | SEQ ID | na | na | 69.7 | 77.3 | 84.2 | 85 | 85.2 | na |
| cinnamomea | NO 106 | | | | | | | | |
| Humicola | SEQ ID | na | na | 6.8 | na | na | na | 89.2 | 83.6 |
| hyalothermophila | NO 117 | | | | | | | | |
| Thielavia | SEQ ID | na | na | na | 47.4 | 64.3 | 57 | 52.1 | 45.2 |
| australiensis | NO 119 | | | | | | | | |
| Crassicarpon | SEQ ID | na | na | na | na | na | 85.3 | 83.3 | 73.4 |
| thermophilum | NO 107 | | | | | | | | |

Note A:
SEQ ID NO: 2 of U.S. Pat. No. 5,646,025

[0582] An aspect of the invention is directed to an animal feed additive comprising a catalase wherein the catalase is thermal stable such that it retains at least 50% of its activity when measured at 50 ° C. and pH 5 such as retaining at least 55% activity, such as retaining at least 60% activity, such as retaining least 65% activity, such as retaining at least 70% activity, such as retaining at least 75% activity, such as retaining at least 80% activity. An aspect of the invention is directed to an animal feed additive comprising a catalase wherein the catalase is thermal stable such that its Tm is at least 50 ° C. at pH 5.

[0583] An aspect of the invention is directed to an animal feed additive comprising a catalase wherein the catalase is thermal stable such that it retains at least 50% of its activity when measured at 50 ° C. and pH 4 such as retaining at least 55% activity, such as retaining at least 60% activity, such as retaining least 65% activity, such as retaining at least 70% activity, such as retaining at least 75% activity, such as retaining at least 80% activity. An aspect of the invention is directed to an animal feed additive comprising a catalase wherein the catalase is thermal stable such that its Tm is at least 50 ° C. at pH 4.

[0584] An aspect of the invention is directed to an animal feed additive comprising a catalase wherein the catalase is thermal stable such that it retains at least 50% of its activity when measured at 40 ° C. and pH 3 such as retaining at least 55% activity, such as retaining at least 60% activity, such as retaining least 65% activity, such as retaining at least 70% activity, such as retaining at least 75% activity, such as retaining at least 80% activity. An aspect of the invention is directed to an animal feed additive comprising a catalase wherein the catalase is thermal stable such that its Tm is at least 40 ° C. at pH 3.

### Gastric Stability of Catalases

[0585] The catalase from Bovine Liver (Enzyme Commission (EC) Number: 1.11.1.6 CAS Number: 9001-05-2, Molecular weight: 250 kDa) has an acitivty of 3524 U/mg EP and a gastric stability wherein it retains only 40% of its activity under the gastric stability studies of Example 12.

[0586] One aspect of the invention is directed to an animal feed additive further comprising a catalase wherein the catalase is gastric stable such that it retains at least 40% of its activity when measured according to the test method described in Example 12, such as retaining at least 50% activity, such as retaining at least 55% activity, such as retaining at least 60% activity, such as retaining at least 65% activity, such as retaining at least 70% activity, such as retaining at least 75% activity, such as retaining at least 80% activity. As can be seen from the Table in Example 12, each of SEQ ID NO 109, SEQ ID NO 126, SEQ ID NO 7, SEQ ID NO 250, SEQ ID NO 105, SEQ ID NO 108, SEQ ID NO 116, SEQ ID NO 105, SEQ ID NO 112, SEQ ID NO 115, SEQ ID NO 104, SEQ ID NO 117, SEQ ID NO 107, SEQ ID NO 110, SEQ ID NO 123 retain at least 50% of their activity at pH 3 and exposure to pepsin. s

[0587] Super Oxide Dismutases

[0588] Superoxide dismutase (SOD, EC 1.15.1,1) is an enzyme that alternately catalyzes the dismutation (or partitioning) of the superoxide (O₂⁻) radical into either ordinary molecular oxygen (O₂) or hydrogen peroxide (H₂O₂).

[0589] The invention is furthermore directed to an animal feed or animal feed additive comprising polypeptides of fungal origin having superoxide dismutase activity.

[0590] More particularly, according to the invention, the animal feed or animal feed additive comprising polypeptides of fungal origin having superoxide dismutase activity may comprise a polypeptide of fungal origin having superoxide dismutase activity selected from the group consisting of:
[0591] a. a polypeptide having at least 75%, at least 80%, at least 85%, at least 86%, at least 87%, at least 88%, at least 89%, at least 90%, at least 91%, at least 92%, at least 93%, at least 94%, at least 95%, at least 96%, at least 97%, at least 98%, at least 99%, or 100% sequence identity to SEQ ID NO: 1;
[0592] b. a polypeptide having at least 75%, at least 80%, at least 85%, at least 86%, at least 87%, at least 88%, at least 89%, at least 90%, at least 91%, at least 92%, at least 93%, at least 94%, at least 95%, at least 96%, at least 97%, at least 98%, at least 99%, or 100% sequence identity to SEQ ID NO: 2;
[0593] c. a polypeptide having at least 75%, at least 80%, at least 85%, at least 86%, at least 87%, at least 88%, at least 89%, at least 90%, at least 91%, at least 92%, at least 93%, at least 94%, at least 95%, at least 96%, at least 97%, at least 98%, at least 99%, or 100% sequence identity to SEQ ID NO: 3;
[0594] d. a polypeptide having at least 75%, at least 80%, at least 85%, at least 86%, at least 87%, at least 88%, at least 89%, at least 90%, at least 91%, at least 92%, at least 93%, at least 94%, at least 95%, at least 96%, at least 97%, at least 98%, at least 99%, or 100% sequence identity to SEQ ID NO: 4;
[0595] e. a polypeptide having at least 75%, at least 80%, at least 85%, at least 86%, at least 87%, at least 88%, at least 89%, at least 90%, at least 91%, at least 92%, at least 93%, at least 94%, at least 95%, at least 96%, at least 97%, at least 98%, at least 99%, or 100% sequence identity to SEQ ID NO: 9;
[0596] f. a polypeptide having at least 75%, at least 80%, at least 85%, at least 86%, at least 87%, at least 88%, at least 89%, at least 90%, at least 91%, at least 92%, at least 93%, at least 94%, at least 95%, at least 96%, at least 97%, at least 98%, at least 99%, or 100% sequence identity to SEQ ID NO: 10;
[0597] g. a polypeptide having at least 75%, at least 80%, at least 85%, at least 86%, at least 87%, at least 88%, at least 89%, at least 90%, at least 91%, at least 92%, at least 93%, at least 94%, at least 95%, at least 96%, at least 97%, at least 98%, at least 99%, or 100% sequence identity to SEQ ID NO: 11;
[0598] h. a polypeptide having at least 75%, at least 80%, at least 85%, at least 86%, at least 87%, at least 88%, at least 89%, at least 90%, at least 91%, at least 92%, at least 93%, at least 94%, at least 95%, at least 96%, at least 97%, at least 98%, at least 99%, or 100% sequence identity to SEQ ID NO: 12;
[0599] i. a polypeptide having at least 75%, at least 80%, at least 85%, at least 86%, at least 87%, at least 88%, at least 89%, at least 90%, at least 91%, at least 92%, at least 93%, at least 94%, at least 95%, at least 96%, at least 97%, at least 98%, at least 99%, or 100% sequence identity to SEQ ID NO: 13;
[0600] j. a polypeptide having at least 75%, at least 80%, at least 85%, at least 86%, at least 87%, at least 88%, at least 89%, at least 90%, at least 91%, at least 92%, at least 93%, at least 94%, at least 95%, at least 96%, at least 97%, at least 98%, at least 99%, or 100% sequence identity to SEQ ID NO: 14;
[0601] k. a polypeptide having at least 75%, at least 80%, at least 85%, at least 86%, at least 87%, at least 88%, at least 89%, at least 90%, at least 91%, at least 92%, at least 93%, at least 94%, at least 95%, at least 96%, at least 97%, at least 98%, at least 99%, or 100% sequence identity to SEQ ID NO: 15;
[0602] l. a polypeptide having at least 75%, at least 80%, at least 85%, at least 86%, at least 87%, at least 88%, at least 89%, at least 90%, at least 91%, at least 92%, at least 93%, at least 94%, at least 95%, at least 96%, at least 97%, at least 98%, at least 99%, or 100% sequence identity to SEQ ID NO: 16;
[0603] m. a polypeptide having at least 75%, at least 80%, at least 85%, at least 86%, at least 87%, at least 88%, at least 89%, at least 90%, at least 91%, at least 92%, at least 93%, at least 94%, at least 95%, at least 96%, at least 97%, at least 98%, at least 99%, or 100% sequence identity to SEQ ID NO: 17;
[0604] n. a polypeptide having at least 75%, at least 80%, at least 85%, at least 86%, at least 87%, at least 88%, at least 89%, at least 90%, at least 91%, at least 92%, at least 93%, at least 94%, at least 95%, at least 96%, at least 97%, at least 98%, at least 99%, or 100% sequence identity to SEQ ID NO: 19;
[0605] o. a polypeptide having at least 75%, at least 80%, at least 85%, at least 86%, at least 87%, at least 88%, at least 89%, at least 90%, at least 91%, at least 92%, at least 93%, at least 94%, at least 95%, at least 96%, at least 97%, at least 98%, at least 99%, or 100% sequence identity to SEQ ID NO: 20;
[0606] p. a polypeptide having at least 75%, at least 80%, at least 85%, at least 86%, at least 87%, at least 88%, at least 89%, at least 90%, at least 91%, at least 92%, at least 93%, at least 94%, at least 95%, at least 96%, at least 97%, at least 98%, at least 99%, or 100% sequence identity to SEQ ID NO: 21;
[0607] q. a polypeptide having at least 75%, at least 80%, at least 85%, at least 86%, at least 87%, at least 88%, at least 89%, at least 90%, at least 91%, at least 92%, at least 93%, at least 94%, at least 95%, at least 96%, at least 97%, at least 98%, at least 99%, or 100% sequence identity to SEQ ID NO: 22;
[0608] r. a polypeptide having at least 75%, at least 80%, at least 85%, at least 86%, at least 87%, at least 88%, at least 89%, at least 90%, at least 91%, at least 92%, at least 93%, at least 94%, at least 95%, at least 96%, at least 97%, at least 98%, at least 99%, or 100% sequence identity to SEQ ID NO: 23;
[0609] s. a polypeptide having at least 75%, at least 80%, at least 85%, at least 86%, at least 87%, at least 88%, at least 89%, at least 90%, at least 91%, at least 92%, at least 93%, at least 94%, at least 95%, at least 96%, at least 97%, at least 98%, at least 99%, or 100% sequence identity to SEQ ID NO: 24;
[0610] t. a polypeptide having at least 75%, at least 80%, at least 85%, at least 86%, at least 87%, at least 88%, at least 89%, at least 90%, at least 91%, at least 92%, at least 93%, at least 94%, at least 95%, at least 96%, at least 97%, at least 98%, at least 99%, or 100% sequence identity to SEQ ID NO: 25;
[0611] u. a polypeptide having at least 75%, at least 80%, at least 85%, at least 86%, at least 87%, at least 88%, at least 89%, at least 90%, at least 91%, at least 92%, at least 93%, at least 94%, at least 95%, at least 96%, at least 97%, at least 98%, at least 99%, or 100% sequence identity to SEQ ID NO: 26;
[0612] v. a polypeptide having at least 75%, at least 80%, at least 85%, at least 86%, at least 87%, at least 88%, at least 89%, at least 90%, at least 91%, at least 92%, at least 93%, at least 94%, at least 95%, at least 96%, at least 97%, at least 98%, at least 99%, or 100% sequence identity to SEQ ID NO: 27;
[0613] w. a polypeptide having at least 75%, at least 80%, at least 85%, at least 86%, at least 87%, at least 88%, at least 89%, at least 90%, at least 91%, at least 92%, at least 93%, at least 94%, at least 95%, at least 96%, at least 97%, at least 98%, at least 99%, or 100% sequence identity to SEQ ID NO: 28;
[0614] x. a polypeptide having at least 75%, at least 80%, at least 85%, at least 86%, at least 87%, at least 88%, at least 89%, at least 90%, at least 91%, at least 92%, at least 93%, at least 94%, at least 95%, at least 96%, at least 97%, at least 98%, at least 99%, or 100% sequence identity to SEQ ID NO: 29;
[0615] y. a polypeptide having at least 75%, at least 80%, at least 85%, at least 86%, at least 87%, at least 88%, at least 89%, at least 90%, at least 91%, at least 92%, at least 93%, at least 94%, at least 95%, at least 96%, at least 97%, at least 98%, at least 99%, or 100% sequence identity to SEQ ID NO: 30;
[0616] z. a polypeptide having at least 75%, at least 80%, at least 85%, at least 86%, at least 87%, at least 88%, at least 89%, at least 90%, at least 91%, at least 92%, at least 93%, at least 94%, at least 95%, at least 96%, at least 97%, at least 98%, at least 99%, or 100% sequence identity to SEQ ID NO: 31;
[0617] aa. a polypeptide having at least 75%, at least 80%, at least 85%, at least 86%, at least 87%, at least 88%, at least 89%, at least 90%, at least 91%, at least 92%, at least 93%, at least 94%, at least 95%, at least 96%, at least 97%, at least 98%, at least 99%, or 100% sequence identity to SEQ ID NO: 32;
[0618] bb. a polypeptide having at least 75%, at least 80%, at least 85%, at least 86%, at least 87%, at least 88%, at least 89%, at least 90%, at least 91%, at least 92%, at least 93%, at least 94%, at least 95%, at least 96%, at least 97%, at least 98%, at least 99%, or 100% sequence identity to SEQ ID NO: 33;
[0619] cc. a polypeptide having at least 75%, at least 80%, at least 85%, at least 86%, at least 87%, at least 88%, at least 89%, at least 90%, at least 91%, at least 92%, at least 93%, at least 94%, at least 95%, at least 96%, at least 97%, at least 98%, at least 99%, or 100% sequence identity to SEQ ID NO: 34;
[0620] dd. a polypeptide having at least 75%, at least 80%, at least 85%, at least 86%, at least 87%, at least 88%, at least 89%, at least 90%, at least 91%, at least 92%, at least 93%, at least 94%, at least 95%, at least 96%, at least 97%, at least 98%, at least 99%, or 100% sequence identity to SEQ ID NO: 36;
[0621] ee. a polypeptide having at least 75%, at least 80%, at least 85%, at least 86%, at least 87%, at least 88%, at least 89%, at least 90%, at least 91%, at least 92%, at least 93%, at least 94%, at least 95%, at least 96%, at least 97%, at least 98%, at least 99%, or 100% sequence identity to SEQ ID NO: 38;
[0622] ff. a polypeptide having at least 75%, at least 80%, at least 85%, at least 86%, at least 87%, at least 88%, at least 89%, at least 90%, at least 91%, at least 92%, at least 93%, at least 94%, at least 95%, at least 96%, at least 97%, at least 98%, at least 99%, or 100% sequence identity to SEQ ID NO: 39;
[0623] gg. a polypeptide having at least 75%, at least 80%, at least 85%, at least 86%, at least 87%, at least 88%, at least 89%, at least 90%, at least 91%, at least 92%, at least 93%, at least 94%, at least 95%, at least 96%, at least 97%, at least 98%, at least 99%, or 100% sequence identity to SEQ ID NO: 40;
[0624] hh. a polypeptide having at least 75%, at least 80%, at least 85%, at least 86%, at least 87%, at least 88%, at least 89%, at least 90%, at least 91%, at least 92%, at least 93%, at least 94%, at least 95%, at least 96%, at least 97%, at least 98%, at least 99%, or 100% sequence identity to SEQ ID NO: 41;
[0625] ii. a polypeptide having at least 75%, at least 80%, at least 85%, at least 86%, at least 87%, at least 88%, at least 89%, at least 90%, at least 91%, at least 92%, at least 93%, at least 94%, at least 95%, at least 96%, at least 97%, at least 98%, at least 99%, or 100% sequence identity to SEQ ID NO: 42;
[0626] jj. a polypeptide having at least 75%, at least 80%, at least 85%, at least 86%, at least 87%, at least 88%, at least 89%, at least 90%, at least 91%, at least 92%, at least 93%, at least 94%, at least 95%, at least 96%, at least 97%, at least 98%, at least 99%, or 100% sequence identity to SEQ ID NO: 43;
[0627] kk. a polypeptide having at least 75%, at least 80%, at least 85%, at least 86%, at least 87%, at least 88%, at least 89%, at least 90%, at least 91%, at least 92%, at least 93%, at least 94%, at least 95%, at least 96%, at least 97%, at least 98%, at least 99%, or 100% sequence identity to SEQ ID NO: 44;
[0628] ll. a polypeptide having at least 75%, at least 80%, at least 85%, at least 86%, at least 87%, at least 88%, at least 89%, at least 90%, at least 91%, at least 92%, at least 93%, at least 94%, at least 95%, at least 96%, at least 97%, at least 98%, at least 99%, or 100% sequence identity to SEQ ID NO: 45;
[0629] mm. a polypeptide having at least 75%, at least 80%, at least 85%, at least 86%, at least 87%, at least 88%, at least 89%, at least 90%, at least 91%, at least 92%, at least 93%, at least 94%, at least 95%, at least 96%, at least 97%, at least 98%, at least 99%, or 100% sequence identity to SEQ ID NO: 46;
[0630] nn. a polypeptide having at least 75%, at least 80%, at least 85%, at least 86%, at least 87%, at least 88%, at least 89%, at least 90%, at least 91%, at least 92%, at least 93%, at least 94%, at least 95%, at least 96%, at least 97%, at least 98%, at least 99%, or 100% sequence identity to SEQ ID NO: 47; and
[0631] oo. a polypeptide having at least 75%, at least 80%, at least 85%, at least 86%, at least 87%, at least 88%, at least 89%, at least 90%, at least 91%, at least 92%, at least 93%, at least 94%, at least 95%, at least 96%, at least 97%, at least 98%, at least 99%, or 100% sequence identity to SEQ ID NO: 48;
[0632] pp. a polypeptide having at least 75%, at least 80%, at least 85%, at least 86%, at least 87%, at least 88%, at least 89%, at least 90%, at least 91%, at least 92%, at least 93%, at least 94%, at least 95%, at least 96%, at least 97%, at least 98%, at least 99%, or 100% sequence identity to SEQ ID NO:199;
[0633] qq. a polypeptide having at least 75%, at least 80%, at least 85%, at least 86%, at least 87%, at least 88%, at least 89%, at least 90%, at least 91%, at least 92%, at least 93%, at least 94%, at least 95%, at least 96%, at least 97%, at least 98%, at least 99%, or 100% sequence identity to SEQ ID NO:200;
[0634] rr. a polypeptide having at least 75%, at least 80%, at least 85%, at least 86%, at least 87%, at least 88%, at least 89%, at least 90%, at least 91%, at least 92%, at least 93%, at least 94%, at least 95%, at least 96%, at least 97%, at least 98%, at least 99%, or 100% sequence identity to SEQ ID NO 201;
[0635] ss. a polypeptide having at least 75%, at least 80%, at least 85%, at least 86%, at least 87%, at least 88%, at least 89%, at least 90%, at least 91%, at least 92%, at least 93%, at least 94%, at least 95%, at least 96%, at least 97%, at least 98%, at least 99%, or 100% sequence identity to SEQ ID NO:202;
[0636] tt. a polypeptide having at least 75%, at least 80%, at least 85%, at least 86%, at least 87%, at least 88%, at least 89%, at least 90%, at least 91%, at least 92%, at least 93%, at least 94%, at least 95%, at least 96%, at least 97%, at least 98%, at least 99%, or 100% sequence identity to SEQ ID NO:203;
[0637] uu. a polypeptide having at least 75%, at least 80%, at least 85%, at least 86%, at least 87%, at least 88%, at least 89%, at least 90%, at least 91%, at least 92%, at least 93%, at least 94%, at least 95%, at least 96%, at least 97%, at least 98%, at least 99%, or 100% sequence identity to SEQ ID NO:204;
[0638] vv. a polypeptide having at least 75%, at least 80%, at least 85%, at least 86%, at least 87%, at least 88%, at least 89%, at least 90%, at least 91%, at least 92%, at least 93%, at least 94%, at least 95%, at least 96%, at least 97%, at least 98%, at least 99%, or 100% sequence identity to SEQ ID NO: 205;
[0639] ww. a polypeptide having at least 75%, at least 80%, at least 85%, at least 86%, at least 87%, at least 88%, at least 89%, at least 90%, at least 91%, at least 92%, at least 93%, at least 94%, at least 95%, at least 96%, at least 97%, at least 98%, at least 99%, or 100% sequence identity to SEQ ID NO:206;
[0640] xx. a polypeptide having at least 75%, at least 80%, at least 85%, at least 86%, at least 87%, at least 88%, at least 89%, at least 90%, at least 91%, at least 92%, at least 93%, at least 94%, at least 95%, at least 96%, at least 97%, at least 98%, at least 99%, or 100% sequence identity to SEQ ID NO:207;
[0641] yy. a polypeptide having at least 75%, at least 80%, at least 85%, at least 86%, at least 87%, at least 88%, at least 89%, at least 90%, at least 91%, at least 92%, at least 93%, at least 94%, at least 95%, at least 96%, at least 97%, at least 98%, at least 99%, or 100% sequence identity to SEQ ID NO:208;
[0642] zz. a polypeptide having at least 75%, at least 80%, at least 85%, at least 86%, at least 87%, at least 88%, at least 89%, at least 90%, at least 91%, at least 92%, at least 93%, at least 94%, at least 95%, at least 96%, at least 97%, at least 98%, at least 99%, or 100% sequence identity to SEQ ID NO:209;
[0643] aaa. a polypeptide having at least 75%, at least 80%, at least 85%, at least 86%, at least 87%, at least 88%, at least 89%, at least 90%, at least 91%, at least 92%, at least 93%, at least 94%, at least 95%, at least 96%, at least 97%, at least 98%, at least 99%, or 100% sequence identity to SEQ ID NO:232;
[0644] bbb. a polypeptide having at least 75%, at least 80%, at least 85%, at least 86%, at least 87%, at least 88%, at least 89%, at least 90%, at least 91%, at least 92%, at least 93%, at least 94%, at least 95%, at least 96%, at least 97%, at least 98%, at least 99%, or 100% sequence identity to SEQ ID NO:233;
[0645] ccc. a polypeptide having at least 75%, at least 80%, at least 85%, at least 86%, at least 87%, at least 88%, at least 89%, at least 90%, at least 91%, at least 92%, at least 93%, at least 94%, at least 95%, at least 96%, at least 97%, at least 98%, at least 99%, or 100% sequence identity to SEQ ID NO:234;
[0646] ddd. a polypeptide having at least 75%, at least 80%, at least 85%, at least 86%, at least 87%, at least 88%, at least 89%, at least 90%, at least 91%, at least 92%, at least 93%, at least 94%, at least 95%, at least 96%, at least 97%, at least 98%, at least 99%, or 100% sequence identity to SEQ ID NO:235;
[0647] eee. a polypeptide having at least 75%, at least 80%, at least 85%, at least 86%, at least 87%, at least 88%, at least 89%, at least 90%, at least 91%, at least 92%, at least 93%, at least 94%, at least 95%, at least 96%, at least 97%, at least 98%, at least 99%, or 100% sequence identity to SEQ ID NO:236; and
[0648] fff. a polypeptide having at least 75%, at least 80%, at least 85%, at least 86%, at least 87%, at least 88%, at least 89%, at least 90%, at least 91%, at least 92%, at least 93%, at least 94%, at least 95%, at least 96%, at least 97%, at least 98%, at least 99%, or 100% sequence identity to SEQ ID NO:237.

[0649] Alternatively defined, the polypeptide having superoxide dismutase activity may comprise an amino acid sequence selected from the group consisting of:
[0650] a. an amino acid sequence having at least 75%, at least 80%, at least 85%, at least 86%, at least 87%, at least 88%, at least 89%, at least 90%, at least 91%, at least 92%, at least 93%, at least 94%, at least 95%, at least 96%, at least 97%, at least 98%, at least 99%, or 100% sequence identity to the amino acid sequence of SEQ ID NO: 1;
[0651] b. an amino acid sequence having at least 75%, at least 80%, at least 85%, at least 86%, at least 87%, at least 88%, at least 89%, at least 90%, at least 91%, at least 92%, at least 93%, at least 94%, at least 95%, at least 96%, at least 97%, at least 98%, at least 99%, or 100% sequence identity to the amino acid sequence of SEQ ID NO: 2;
[0652] c. an amino acid sequence having at least 75%, at least 80%, at least 85%, at least 86%, at least 87%, at least 88%, at least 89%, at least 90%, at least 91%, at least 92%, at least 93%, at least 94%, at least 95%, at least 96%, at least 97%, at least 98%, at least 99%, or 100% sequence identity to the amino acid sequence of SEQ ID NO: 3;
[0653] d. an amino acid sequence having at least 75%, at least 80%, at least 85%, at least 86%, at least 87%, at least 88%, at least 89%, at least 90%, at least 91%, at least 92%, at least 93%, at least 94%, at least 95%, at least 96%, at least 97%, at least 98%, at least 99%, or 100% sequence identity to the amino acid sequence of SEQ ID NO: 4;
[0654] e. an amino acid sequence having at least 75%, at least 80%, at least 85%, at least 86%, at least 87%, at least 88%, at least 89%, at least 90%, at least 91%, at least 92%, at least 93%, at least 94%, at least 95%, at least 96%, at least 97%, at least 98%, at least 99%, or 100% sequence identity to the amino acid sequence of SEQ ID NO: 9;
[0655] f. an amino acid sequence having at least 75%, at least 80%, at least 85%, at least 86%, at least 87%, at least 88%, at least 89%, at least 90%, at least 91%, at least 92%, at least 93%, at least 94%, at least 95%, at least 96%, at least 97%, at least 98%, at least 99%, or 100% sequence identity to the amino acid sequence of SEQ ID NO: 10;
[0656] g. an amino acid sequence having at least 75%, at least 80%, at least 85%, at least 86%, at least 87%, at least 88%, at least 89%, at least 90%, at least 91%, at least 92%, at least 93%, at least 94%, at least 95%, at least 96%, at least 97%, at least 98%, at least 99%, or 100% sequence identity to the amino acid sequence of SEQ ID NO: 11;
[0657] h. an amino acid sequence having at least 75%, at least 80%, at least 85%, at least 86%, at least 87%, at least 88%, at least 89%, at least 90%, at least 91%, at least 92%, at least 93%, at least 94%, at least 95%, at least 96%, at least 97%, at least 98%, at least 99%, or 100% sequence identity to the amino acid sequence of SEQ ID NO: 12;
[0658] i. an amino acid sequence having at least 75%, at least 80%, at least 85%, at least 86%, at least 87%, at least 88%, at least 89%, at least 90%, at least 91%, at least 92%, at least 93%, at least 94%, at least 95%, at least 96%, at least 97%, at least 98%, at least 99%, or 100% sequence identity to the amino acid sequence of SEQ ID NO: 13;
[0659] j. an amino acid sequence having at least 75%, at least 80%, at least 85%, at least 86%, at least 87%, at least 88%, at least 89%, at least 90%, at least 91%, at least 92%, at least 93%, at least 94%, at least 95%, at least 96%, at least 97%, at least 98%, at least 99%, or 100% sequence identity to the amino acid sequence of SEQ ID NO: 14;
[0660] k. an amino acid sequence having at least 75%, at least 80%, at least 85%, at least 86%, at least 87%, at least 88%, at least 89%, at least 90%, at least 91%, at least 92%, at least 93%, at least 94%, at least 95%, at least 96%, at least 97%, at least 98%, at least 99%, or 100% sequence identity to the amino acid sequence of SEQ ID NO: 15;
[0661] l. an amino acid sequence having at least 75%, at least 80%, at least 85%, at least 86%, at least 87%, at least 88%, at least 89%, at least 90%, at least 91%, at least 92%, at least 93%, at least 94%, at least 95%, at least 96%, at least 97%, at least 98%, at least 99%, or 100% sequence identity to the amino acid sequence of SEQ ID NO: 16;
[0662] m. an amino acid sequence having at least 75%, at least 80%, at least 85%, at least 86%, at least 87%, at least 88%, at least 89%, at least 90%, at least 91%, at least 92%, at least 93%, at least 94%, at least 95%, at least 96%, at least 97%, at least 98%, at least 99%, or 100% sequence identity to the amino acid sequence of SEQ ID NO: 17;
[0663] n. an amino acid sequence having at least 75%, at least 80%, at least 85%, at least 86%, at least 87%, at least 88%, at least 89%, at least 90%, at least 91%, at least 92%, at least 93%, at least 94%, at least 95%, at least 96%, at least 97%, at least 98%, at least 99%, or 100% sequence identity to the amino acid sequence of SEQ ID NO: 19;
[0664] o. an amino acid sequence having at least 75%, at least 80%, at least 85%, at least 86%, at least 87%, at least 88%, at least 89%, at least 90%, at least 91%, at least 92%, at least 93%, at least 94%, at least 95%, at least 96%, at least 97%, at least 98%, at least 99%, or 100% sequence identity to the amino acid sequence of SEQ ID NO: 20;
[0665] p. an amino acid sequence having at least 75%, at least 80%, at least 85%, at least 86%, at least 87%, at least 88%, at least 89%, at least 90%, at least 91%, at least 92%, at least 93%, at least 94%, at least 95%, at least 96%, at least 97%, at least 98%, at least 99%, or 100% sequence identity to the amino acid sequence of SEQ ID NO: 21;
[0666] q. an amino acid sequence having at least 75%, at least 80%, at least 85%, at least 86%, at least 87%, at least 88%, at least 89%, at least 90%, at least 91%, at least 92%, at least 93%, at least 94%, at least 95%, at least 96%, at least 97%, at least 98%, at least 99%, or 100% sequence identity to the amino acid sequence of SEQ ID NO: 22;
[0667] r. an amino acid sequence having at least 75%, at least 80%, at least 85%, at least 86%, at least 87%, at least 88%, at least 89%, at least 90%, at least 91%, at least 92%, at least 93%, at least 94%, at least 95%, at least 96%, at least 97%, at least 98%, at least 99%, or 100% sequence identity to the amino acid sequence of SEQ ID NO: 23;
[0668] s. an amino acid sequence having at least 75%, at least 80%, at least 85%, at least 86%, at least 87%, at least 88%, at least 89%, at least 90%, at least 91%, at least 92%, at least 93%, at least 94%, at least 95%, at least 96%, at least 97%, at least 98%, at least 99%, or 100% sequence identity to the amino acid sequence of SEQ ID NO: 24;
[0669] t. an amino acid sequence having at least 75%, at least 80%, at least 85%, at least 86%, at least 87%, at least 88%, at least 89%, at least 90%, at least 91%, at least 92%, at least 93%, at least 94%, at least 95%, at least 96%, at least 97%, at least 98%, at least 99%, or 100 sequence identity to the amino acid sequence of SEQ ID NO: 25;
[0670] u. an amino acid sequence having at least 75%, at least 80%, at least 85%, at least 86%, at least 87%, at least 88%, at least 89%, at least 90%, at least 91%, at least 92%, at least 93%, at least 94%, at least 95%, at least 96%, at least 97%, at least 98%, at least 99%, or 100% sequence identity to the amino acid sequence of SEQ ID NO: 26;
[0671] v. an amino acid sequence having at least 75%, at least 80%, at least 85%, at least 86%, at least 87%, at least 88%, at least 89%, at least 90%, at least 91%, at least 92%, at least 93%, at least 94%, at least 95%, at least 96%, at least 97%, at least 98%, at least 99%, or 100% sequence identity to the amino acid sequence of SEQ ID NO: 27;
[0672] w. an amino acid sequence having at least 75%, at least 80%, at least 85%, at least 86%, at least 87%, at least 88%, at least 89%, at least 90%, at least 91%, at least 92%, at least 93%, at least 94%, at least 95%, at least 96%, at least 97%, at least 98%, at least 99%, or 100% sequence identity to the amino acid sequence of SEQ ID NO: 28;
[0673] x. an amino acid sequence having at least 75%, at least 80%, at least 85%, at least 86%, at least 87%, at least 88%, at least 89%, at least 90%, at least 91%, at least 92%, at least 93%, at least 94%, at least 95%, at least 96%, at least 97%, at least 98%, at least 99%, or 100% sequence identity to the amino acid sequence of SEQ ID NO: 29;
[0674] y. an amino acid sequence having at least 75%, at least 80%, at least 85%, at least 86%, at least 87%, at least 88%, at least 89%, at least 90%, at least 91%, at least 92%, at least 93%, at least 94%, at least 95%, at least 96%, at least 97%, at least 98%, at least 99%, or 100% sequence identity to the amino acid sequence of SEQ ID NO: 30;
[0675] z. an amino acid sequence having at least 75%, at least 80%, at least 85%, at least 86%, at least 87%, at least 88%, at least 89%, at least 90%, at least 91%, at least 92%, at least 93%, at least 94%, at least 95%, at least 96%, at least 97%, at least 98%, at least 99%, or 100% sequence identity to the amino acid sequence of SEQ ID NO: 31;
[0676] aa. an amino acid sequence having at least 75%, at least 80%, at least 85%, at least 86%, at least 87%, at least 88%, at least 89%, at least 90%, at least 91%, at least 92%, at least 93%, at least 94%, at least 95%, at least 96%, at least 97%, at least 98%, at least 99%, or 100% sequence identity to the amino acid sequence of SEQ ID NO: 32;
[0677] bb. an amino acid sequence having at least 75%, at least 80%, at least 85%, at least 86%, at least 87%, at least 88%, at least 89%, at least 90%, at least 91%, at least 92%, at least 93%, at least 94%, at least 95%, at least 96%, at least 97%, at least 98%, at least 99%, or 100% sequence identity to the amino acid sequence of SEQ ID NO: 33;
[0678] cc. an amino acid sequence having at least 75%, at least 80%, at least 85%, at least 86%, at least 87%, at least 88%, at least 89%, at least 90%, at least 91%, at least 92%, at least 93%, at least 94%, at least 95%, at least 96%, at least 97%, at least 98%, at least 99%, or 100% sequence identity to the amino acid sequence of SEQ ID NO: 34;
[0679] dd. an amino acid sequence having at least 75%, at least 80%, at least 85%, at least 86%, at least 87%, at least 88%, at least 89%, at least 90%, at least 91%, at least 92%, at least 93%, at least 94%, at least 95%, at least 96%, at least 97%, at least 98%, at least 99%, or 100% sequence identity to the amino acid sequence of SEQ ID NO: 36;
[0680] ee. an amino acid sequence having at least 75%, at least 80%, at least 85%, at least 86%, at least 87%, at least 88%, at least 89%, at least 90%, at least 91%, at least 92%, at least 93%, at least 94%, at least 95%, at least 96%, at least 97%, at least 98%, at least 99%, or 100% sequence identity to the amino acid sequence of SEQ ID NO: 38;
[0681] ff. an amino acid sequence having at least 75%, at least 80%, at least 85%, at least 86%, at least 87%, at least 88%, at least 89%, at least 90%, at least 91%, at least 92%, at least 93%, at least 94%, at least 95%, at least 96%, at least 97%, at least 98%, at least 99%, or 100% sequence identity to the amino acid sequence of SEQ ID NO: 39;
[0682] gg. an amino acid sequence having at least 75%, at least 80%, at least 85%, at least 86%, at least 87%, at least 88%, at least 89%, at least 90%, at least 91%, at least 92%, at least 93%, at least 94%, at least 95%, at least 96%, at least 97%, at least 98%, at least 99%, or 100% sequence identity to SEQ ID NO: 40;
[0683] hh. an amino acid sequence having at least 75%, at least 80%, at least 85%, at least 86%, at least 87%, at least 88%, at least 89%, at least 90%, at least 91%, at least 92%, at least 93%, at least 94%, at least 95%, at least 96%, at least 97%, at least 98%, at least 99%, or 100% sequence identity to SEQ ID NO: 41;
[0684] ii. an amino acid sequence having at least 75%, at least 80%, at least 85%, at least 86%, at least 87%, at least 88%, at least 89%, at least 90%, at least 91%, at least 92%, at least 93%, at least 94%, at least 95%, at least 96%, at least 97%, at least 98%, at least 99%, or 100% sequence identity to the amino acid sequence of SEQ ID NO: 42;
[0685] jj. an amino acid sequence having at least 75%, at least 80%, at least 85%, at least 86%, at least 87%, at least 88%, at least 89%, at least 90%, at least 91%, at least 92%, at least 93%, at least 94%, at least 95%, at least 96%, at least 97%, at least 98%, at least 99%, or 100% sequence identity to the amino acid sequence of SEQ ID NO: 43;
[0686] kk. an amino acid sequence having at least 75%, at least 80%, at least 85%, at least 86%, at least 87%, at least 88%, at least 89%, at least 90%, at least 91%, at least 92%, at least 93%, at least 94%, at least 95%, at least 96%, at least 97%, at least 98%, at least 99%, or 100% sequence identity to the amino acid sequence of SEQ ID NO: 44;
[0687] ll. an amino acid sequence having at least 75%, at least 80%, at least 85%, at least 86%, at least 87%, at least 88%, at least 89%, at least 90%, at least 91%, at least 92%, at least 93%, at least 94%, at least 95%, at least 96%, at least 97%, at least 98%, at least 99%, or 100% sequence identity to the amino acid sequence of SEQ ID NO: 45;
[0688] mm. an amino acid sequence having at least 75%, at least 80%, at least 85%, at least 86%, at least 87%, at least 88%, at least 89%, at least 90%, at least 91%, at least 92%, at least 93%, at least 94%, at least 95%, at least 96%, at least 97%, at least 98%, at least 99%, or 100% sequence identity to the amino acid sequence of SEQ ID NO: 46;
[0689] nn. an amino acid sequence having at least 75%, at least 80%, at least 85%, at least 86%, at least 87%, at least 88%, at least 89%, at least 90%, at least 91%, at least 92%, at least 93%, at least 94%, at least 95%, at least 96%, at least 97%, at least 98%, at least 99%, or 100% sequence identity to the amino acid sequence of SEQ ID NO: 47; and
[0690] oo. an amino acid sequence having at least 75%, at least 80%, at least 85%, at least 86%, at least 87%, at least 88%, at least 89%, at least 90%, at least 91%, at least 92%, at least 93%, at least 94%, at least 95%, at least 96%, at least 97%, at least 98%, at least 99%, or 100% sequence identity to the amino acid sequence of SEQ ID NO: 48;
[0691] pp. an amino acid sequence having at least 75%, at least 80%, at least 85%, at least 86%, at least 87%, at least 88%, at least 89%, at least 90%, at least 91%, at least 92%, at least 93%, at least 94%, at least 95%, at least 96%, at least 97%, at least 98%, at least 99%, or 100% sequence identity to the amino acid sequence of SEQ ID NO:199;
[0692] qq. an amino acid sequence having at least 75%, at least 80%, at least 85%, at least 86%, at least 87%, at least 88%, at least 89%, at least 90%, at least 91%, at least 92%, at least 93%, at least 94%, at least 95%, at least 96%, at least 97%, at least 98%, at least 99%, or 100% sequence identity to the amino acid sequence of SEQ ID NO:200;
[0693] rr. an amino acid sequence having at least 75%, at least 80%, at least 85%, at least 86%, at least 87%, at least 88%, at least 89%, at least 90%, at least 91%, at least 92%, at least 93%, at least 94%, at least 95%, at least 96%, at least 97%, at least 98%, at least 99%, or 100% sequence identity to the amino acid sequence of SEQ ID NO 201;
[0694] ss. an amino acid sequence having at least 75%, at least 80%, at least 85%, at least 86%, at least 87%, at least 88%, at least 89%, at least 90%, at least 91%, at least 92%, at least 93%, at least 94%, at least 95%, at least 96%, at least 97%, at least 98%, at least 99%, or 100% sequence identity to the amino acid sequence of SEQ ID NO:202;
[0695] tt. an amino acid sequence having at least 75%, at least 80%, at least 85%, at least 86%, at least 87%, at least 88%, at least 89%, at least 90%, at least 91%, at least 92%, at least 93%, at least 94%, at least 95%, at least 96%, at least 97%, at least 98%, at least 99%, or 100% sequence identity to the amino acid sequence of SEQ ID NO:203;
[0696] uu. an amino acid sequence having at least 75%, at least 80%, at least 85%, at least 86%, at least 87%, at least 88%, at least 89%, at least 90%, at least 91%, at least 92%, at least 93%, at least 94%, at least 95%, at least 96%, at least 97%, at least 98%, at least 99%, or 100% sequence identity to the amino acid sequence of SEQ ID NO:204;
[0697] vv. an amino acid sequence having at least 75%, at least 80%, at least 85%, at least 86%, at least 87%, at least 88%, at least 89%, at least 90%, at least 91%, at least 92%, at least 93%, at least 94%, at least 95%, at least 96%, at least 97%, at least 98%, at least 99%, or 100% sequence identity to the amino acid sequence of SEQ ID NO: 205;
[0698] ww. an amino acid sequence having at least 75%, at least 80%, at least 85%, at least 86%, at least 87%, at least 88%, at least 89%, at least 90%, at least 91%, at least 92%, at least 93%, at least 94%, at least 95%, at least 96%, at least 97%, at least 98%, at least 99%, or 100% sequence identity to the amino acid sequence of SEQ ID NO:206;
[0699] xx. an amino acid sequence having at least 75%, at least 80%, at least 85%, at least 86%, at least 87%, at least 88%, at least 89%, at least 90%, at least 91%, at least 92%, at least 93%, at least 94%, at least 95%, at least 96%, at least 97%, at least 98%, at least 99%, or 100% sequence identity to the amino acid sequence of SEQ ID NO:207;
[0700] yy. an amino acid sequence having at least 75%, at least 80%, at least 85%, at least 86%, at least 87%, at least 88%, at least 89%, at least 90%, at least 91%, at least 92%, at least 93%, at least 94%, at least 95%, at least 96%, at least 97%, at least 98%, at least 99%, or 100% sequence identity to the amino acid sequence of SEQ ID NO:208;
[0701] zz. an amino acid sequence having at least 75%, at least 80%, at least 85%, at least 86%, at least 87%, at least 88%, at least 89%, at least 90%, at least 91%, at least 92%, at least 93%, at least 94%, at least 95%, at least 96%, at least 97%, at least 98%, at least 99%, or 100% sequence identity to the amino acid sequence of SEQ ID NO:209;
[0702] aaa. an amino acid sequence having at least 75%, at least 80%, at least 85%, at least 86%, at least 87%, at least 88%, at least 89%, at least 90%, at least 91%, at least 92%, at least 93%, at least 94%, at least 95%, at least 96%, at least 97%, at least 98%, at least 99%, or 100% sequence identity to the amino acid sequence of SEQ ID NO:232;
[0703] bbb. an amino acid sequence having at least 75%, at least 80%, at least 85%, at least 86%, at least 87%, at least 88%, at least 89%, at least 90%, at least 91%, at least 92%, at least 93%, at least 94%, at least 95%, at least 96%, at least 97%, at least 98%, at least 99%, or 100% sequence identity to the amino acid sequence of SEQ ID NO:233;
[0704] ccc. an amino acid sequence having at least 75%, at least 80%, at least 85%, at least 86%, at least 87%, at least 88%, at least 89%, at least 90%, at least 91%, at least 92%, at least 93%, at least 94%, at least 95%, at least 96%, at least 97%, at least 98%, at least 99%, or 100% sequence identity to the amino acid sequence of SEQ ID NO:234;
[0705] ddd. an amino acid sequence having at least 75%, at least 80%, at least 85%, at least 86%, at least 87%, at least 88%, at least 89%, at least 90%, at least 91%, at least 92%, at least 93%, at least 94%, at least 95%, at least 96%, at least 97%, at least 98%, at least 99%, or 100% sequence identity to the amino acid sequence of SEQ ID NO:235;
[0706] eee. an amino acid sequence having at least 75%, at least 80%, at least 85%, at least 86%, at least 87%, at least 88%, at least 89%, at least 90%, at least 91%, at least 92%, at least 93%, at least 94%, at least 95%, at least 96%, at least 97%, at least 98%, at least 99%, or 100% sequence identity to the amino acid sequence of SEQ ID NO:236; and
[0707] fff. an amino acid sequence having at least 75%, at least 80%, at least 85%, at least 86%, at least 87%, at least 88%, at least 89%, at least 90%, at least 91%, at least 92%, at least 93%, at least 94%, at least 95%, at least 96%, at least 97%, at least 98%, at least 99%, or 100% sequence identity to the amino acid sequence of SEQ ID NO:237.

[0708] The polypeptide of fungal origin having superoxide dismutase activity may be selected from the group consisting
[0709] a. a polypeptide having at least 75%, at least 80%, at least 85%, at least 86%, at least 87%, at least 88%, at least 89%, at least 90%, at least 91%, at least 92%, at least 93%, at least 94%, at least 95%, at least 96%, at least 97%, at least 98%, at least 99%, or 100% sequence identity to SEQ ID NO 83;
[0710] b. a polypeptide having at least 75%, at least 80%, at least 85%, at least 86%, at least 87%, at least 88%, at least 89%, at least 90%, at least 91%, at least 92%, at least 93%, at least 94%, at least 95%, at least 96%, at least 97%, at least 98%, at least 99%, or 100% sequence identity to SEQ ID NO 84;
[0711] c. a polypeptide having at least 75%, at least 80%, at least 85%, at least 86%, at least 87%, at least 88%, at least 89%, at least 90%, at least 91%, at least 92%, at least 93%, at least 94%, at least 95%, at least 96%, at least 97%, at least 98%, at least 99%, or 100% sequence identity to SEQ ID NO 85;
[0712] d. a polypeptide having at least 75%, at least 80%, at least 85%, at least 86%, at least 87%, at least 88%, at least 89%, at least 90%, at least 91%, at least 92%, at least 93%, at least 94%, at least 95%, at least 96%, at least 97%, at least 98%, at least 99%, or 100% sequence identity to SEQ ID NO 86;
[0713] e. a polypeptide having at least 75%, at least 80%, at least 85%, at least 86%, at least 87%, at least 88%, at least 89%, at least 90%, at least 91%, at least 92%, at least 93%, at least 94%, at least 95%, at least 96%, at least 97%, at least 98%, at least 99%, or 100% sequence identity to SEQ ID NO 49;
[0714] f. a polypeptide having at least 75%, at least 80%, at least 85%, at least 86%, at least 87%, at least 88%, at least 89%, at least 90%, at least 91%, at least 92%, at least 93%, at least 94%, at least 95%, at least 96%, at least 97%, at least 98%, at least 99%, or 100% sequence identity to SEQ ID NO 50;
[0715] g. a polypeptide having at least 75%, at least 80%, at least 85%, at least 86%, at least 87%, at least 88%, at least 89%, at least 90%, at least 91%, at least 92%, at least 93%, at least 94%, at least 95%, at least 96%, at least 97%, at least 98%, at least 99%, or 100% sequence identity to SEQ ID NO 51;
[0716] h. a polypeptide having at least 75%, at least 80%, at least 85%, at least 86%, at least 87%, at least 88%, at least 89%, at least 90%, at least 91%, at least 92%, at least 93%, at least 94%, at least 95%, at least 96%, at least 97%, at least 98%, at least 99%, or 100% sequence identity to SEQ ID NO 52;
[0717] i. a polypeptide having at least 75%, at least 80%, at least 85%, at least 86%, at least 87%, at least 88%, at least 89%, at least 90%, at least 91%, at least 92%, at least 93%, at least 94%, at least 95%, at least 96%, at least 97%, at least 98%, at least 99%, or 100% sequence identity to SEQ ID NO 53;
[0718] j. a polypeptide having at least 75%, at least 80%, at least 85%, at least 86%, at least 87%, at least 88%, at least 89%, at least 90%, at least 91%, at least 92%, at least 93%, at least 94%, at least 95%, at least 96%, at least 97%, at least 98%, at least 99%, or 100% sequence identity to SEQ ID NO 54;
[0719] k. a polypeptide having at least 75%, at least 80%, at least 85%, at least 86%, at least 87%, at least 88%, at least 89%, at least 90%, at least 91%, at least 92%, at least 93%, at least 94%, at least 95%, at least 96%, at least 97%, at least 98%, at least 99%, or 100% sequence identity to SEQ ID NO 55;
[0720] l. a polypeptide having at least 75%, at least 80%, at least 85%, at least 86%, at least 87%, at least 88%, at least 89%, at least 90%, at least 91%, at least 92%, at least 93%, at least 94%, at least 95%, at least 96%, at least 97%, at least 98%, at least 99%, or 100% sequence identity to SEQ ID NO 56;
[0721] m. a polypeptide having at least 75%, at least 80%, at least 85%, at least 86%, at least 87%, at least 88%, at least 89%, at least 90%, at least 91%, at least 92%, at least 93%, at least 94%, at least 95%, at least 96%, at least 97%, at least 98%, at least 99%, or 100% sequence identity to SEQ ID NO 18;
[0722] n. a polypeptide having at least 75%, at least 80%, at least 85%, at least 86%, at least 87%, at least 88%, at least 89%, at least 90%, at least 91%, at least 92%, at least 93%, at least 94%, at least 95%, at least 96%, at least 97%, at least 98%, at least 99%, or 100% sequence identity to SEQ ID NO 57;
[0723] o. a polypeptide having at least 75%, at least 80%, at least 85%, at least 86%, at least 87%, at least 88%, at least 89%, at least 90%, at least 91%, at least 92%, at least 93%, at least 94%, at least 95%, at least 96%, at least 97%, at least 98%, at least 99%, or 100% sequence identity to SEQ ID NO 58;
[0724] p. a polypeptide having at least 75%, at least 80%, at least 85%, at least 86%, at least 87%, at least 88%, at least 89%, at least 90%, at least 91%, at least 92%, at least 93%, at least 94%, at least 95%, at least 96%, at least 97%, at least 98%, at least 99%, or 100% sequence identity to SEQ ID NO 59,
[0725] q. a polypeptide having at least 75%, at least 80%, at least 85%, at least 86%, at least 87%, at least 88%, at least 89%, at least 90%, at least 91%, at least 92%, at least 93%, at least 94%, at least 95%, at least 96%, at least 97%, at least 98%, at least 99%, or 100% sequence identity to SEQ ID NO 60,
[0726] r. a polypeptide having at least 75%, at least 80%, at least 85%, at least 86%, at least 87%, at least 88%, at least 89%, at least 90%, at least 91%, at least 92%, at least 93%, at least 94%, at least 95%, at least 96%, at least 97%, at least 98%, at least 99%, or 100% sequence identity to SEQ ID NO 61;
[0727] s. a polypeptide having at least 75%, at least 80%, at least 85%, at least 86%, at least 87%, at least 88%, at least 89%, at least 90%, at least 91%, at least 92%, at least 93%, at least 94%, at least 95%, at least 96%, at least 97%, at least 98%, at least 99%, or 100% sequence identity to SEQ ID NO 62;
[0728] t. a polypeptide having at least 75%, at least 80%, at least 85%, at least 86%, at least 87%, at least 88%, at least 89%, at least 90%, at least 91%, at least 92%, at least 93%, at least 94%, at least 95%, at least 96%, at least 97%, at least 98%, at least 99%, or 100% sequence identity to SEQ ID NO 63;
[0729] u. a polypeptide having at least 75%, at least 80%, at least 85%, at least 86%, at least 87%, at least 88%, at least 89%, at least 90%, at least 91%, at least 92%, at least 93%, at least 94%, at least 95%, at least 96%, at least 97%, at least 98%, at least 99%, or 100% sequence identity to SEQ ID NO 64;
[0730] v. a polypeptide having at least 75%, at least 80%, at least 85%, at least 86%, at least 87%, at least 88%, at least 89%, at least 90%, at least 91%, at least 92%, at least 93%, at least 94%, at least 95%, at least 96%, at least 97%, at least 98%, at least 99%, or 100% sequence identity to SEQ ID NO 65;
[0731] w. a polypeptide having at least 75%, at least 80%, at least 85%, at least 86%, at least 87%, at least 88%, at least 89%, at least 90%, at least 91%, at least 92%, at least 93%, at least 94%, at least 95%, at least 96%, at least 97%, at least 98%, at least 99%, or 100% sequence identity to SEQ ID NO 66;
[0732] x. a polypeptide having at least 75%, at least 80%, at least 85%, at least 86%, at least 87%, at least 88%, at least 89%, at least 90%, at least 91%, at least 92%, at least 93%, at least 94%, at least 95%, at least 96%, at least 97%, at least 98%, at least 99%, or 100% sequence identity to SEQ ID NO 67;
[0733] y. a polypeptide having at least 75%, at least 80%, at least 85%, at least 86%, at least 87%, at least 88%, at least 89%, at least 90%, at least 91%, at least 92%, at least 93%, at least 94%, at least 95%, at least 96%, at least 97%, at least 98%, at least 99%, or 100% sequence identity to SEQ ID NO 68;
[0734] z. a polypeptide having at least 75%, at least 80%, at least 85%, at least 86%, at least 87%, at least 88%, at least 89%, at least 90%, at least 91%, at least 92%, at least 93%, at least 94%, at least 95%, at least 96%, at least 97%, at least 98%, at least 99%, or 100% sequence identity to SEQ ID NO 69;
[0735] aa. a polypeptide having at least 75%, at least 80%, at least 85%, at least 86%, at least 87%, at least 88%, at least 89%, at least 90%, at least 91%, at least 92%, at least 93%, at least 94%, at least 95%, at least 96%, at least 97%, at least 98%, at least 99%, or 100% sequence identity to SEQ ID NO 70;
[0736] bb. a polypeptide having at least 75%, at least 80%, at least 85%, at least 86%, at least 87%, at least 88%, at least 89%, at least 90%, at least 91%, at least 92%, at least 93%, at least 94%, at least 95%, at least 96%, at least 97%, at least 98%, at least 99%, or 100% sequence identity to SEQ ID NO 71;
[0737] cc. a polypeptide having at least 75%, at least 80%, at least 85%, at least 86%, at least 87%, at least 88%, at least 89%, at least 90%, at least 91%, at least 92%, at least 93%, at least 94%, at least 95%, at least 96%, at least 97%, at least 98%, at least 99%, or 100% sequence identity to SEQ ID NO 35;
[0738] dd. a polypeptide having at least 75%, at least 80%, at least 85%, at least 86%, at least 87%, at least 88%, at least 89%, at least 90%, at least 91%, at least 92%, at least 93%, at least 94%, at least 95%, at least 96%, at least 97%, at least 98%, at least 99%, or 100% sequence identity to SEQ ID NO 37;
[0739] ee. a polypeptide having at least 75%, at least 80%, at least 85%, at least 86%, at least 87%, at least 88%, at least 89%, at least 90%, at least 91%, at least 92%, at least 93%, at least 94%, at least 95%, at least 96%, at least 97%, at least 98%, at least 99%, or 100% sequence identity to SEQ ID NO 72;
[0740] ff. a polypeptide having at least 75%, at least 80%, at least 85%, at least 86%, at least 87%, at least 88%, at least 89%, at least 90%, at least 91%, at least 92%, at least 93%, at least 94%, at least 95%, at least 96%, at least 97%, at least 98%, at least 99%, or 100% sequence identity to SEQ ID NO 73;
[0741] gg. a polypeptide having at least 75%, at least 80%, at least 85%, at least 86%, at least 87%, at least 88%, at least 89%, at least 90%, at least 91%, at least 92%, at least 93%, at least 94%, at least 95%, at least 96%, at least 97%, at least 98%, at least 99%, or 100% sequence identity to SEQ ID NO 74;
[0742] hh. a polypeptide having at least 75%, at least 80%, at least 85%, at least 86%, at least 87%, at least 88%, at least 89%, at least 90%, at least 91%, at least 92%, at least 93%, at least 94%, at least 95%, at least 96%, at least 97%, at least 98%, at least 99%, or 100% sequence identity to SEQ ID NO 75;
[0743] ii. a polypeptide having at least 75%, at least 80%, at least 85%, at least 86%, at least 87%, at least 88%, at least 89%, at least 90%, at least 91%, at least 92%, at least 93%, at least 94%, at least 95%, at least 96%, at least 97%, at least 98%, at least 99%, or 100% sequence identity to SEQ ID NO 76;
[0744] jj. a polypeptide having at least 75%, at least 80%, at least 85%, at least 86%, at least 87%, at least 88%, at least 89%, at least 90%, at least 91%, at least 92%, at least 93%, at least 94%, at least 95%, at least 96%, at least 97%, at least 98%, at least 99%, or 100% sequence identity to SEQ ID NO 77;
[0745] kk. a polypeptide having at least 75%, at least 80%, at least 85%, at least 86%, at least 87%, at least 88%, at least 89%, at least 90%, at least 91%, at least 92%, at least 93%, at least 94%, at least 95%, at least 96%, at least 97%, at least 98%, at least 99%, or 100% sequence identity to SEQ ID NO 78;
[0746] ll. a polypeptide having at least 75%, at least 80%, at least 85%, at least 86%, at least 87%, at least 88%, at least 89%, at least 90%, at least 91%, at least 92%, at least 93%, at least 94%, at least 95%, at least 96%, at least 97%, at least 98%, at least 99%, or 100% sequence identity to SEQ ID NO 79;
[0747] mm. a polypeptide having at least 75%, at least 80%, at least 85%, at least 86%, at least 87%, at least 88%, at least 89%, at least 90%, at least 91%, at least 92%, at least 93%, at least 94%, at least 95%, at least 96%, at least 97%, at least 98%, at least 99%, or 100% sequence identity to SEQ ID NO 80;
[0748] nn. a polypeptide having at least 75%, at least 80%, at least 85%, at least 86%, at least 87%, at least 88%, at least 89%, at least 90%, at least 91%, at least 92%, at least 93%, at least 94%, at least 95%, at least 96%, at least 97%, at least 98%, at least 99%, or 100% sequence identity to SEQ ID NO 81;
[0749] oo. a polypeptide having at least 75%, at least 80%, at least 85%, at least 86%, at least 87%, at least 88%, at least 89%, at least 90%, at least 91%, at least 92%, at least 93%, at least 94%, at least 95%, at least 96%, at least 97%, at least 98%, at least 99%, or 100% sequence identity to SEQ ID NO 82;
[0750] pp. a polypeptide having at least 75%, at least 80%, at least 85%, at least 86%, at least 87%, at least 88%, at least 89%, at least 90%, at least 91%, at least 92%, at least 93%, at least 94%, at least 95%, at least 96%, at least 97%, at least 98%, at least 99%, or 100% sequence identity to SEQ ID NO 210;
[0751] qq. a polypeptide having at least 75%, at least 80%, at least 85%, at least 86%, at least 87%, at least 88%, at least 89%, at least 90%, at least 91%, at least 92%, at least 93%, at least 94%, at least 95%, at least 96%, at least 97%, at least 98%, at least 99%, or 100% sequence identity to SEQ ID NO 211;
[0752] rr. a polypeptide having at least 75%, at least 80%, at least 85%, at least 86%, at least 87%, at least 88%, at least 89%, at least 90%, at least 91%, at least 92%, at least 93%, at least 94%, at least 95%, at least 96%, at least 97%, at least 98%, at least 99%, or 100% sequence identity to SEQ ID NO 212;
[0753] ss. a polypeptide having at least 75%, at least 80%, at least 85%, at least 86%, at least 87%, at least 88%, at least 89%, at least 90%, at least 91%, at least 92%, at least 93%, at least 94%, at least 95%, at least 96%, at least 97%, at least 98%, at least 99%, or 100% sequence identity to SEQ ID NO 213;
[0754] tt. a polypeptide having at least 75%, at least 80%, at least 85%, at least 86%, at least 87%, at least 88%, at least 89%, at least 90%, at least 91%, at least 92%, at least 93%, at least 94%, at least 95%, at least 96%, at least 97%, at least 98%, at least 99%, or 100% sequence identity to SEQ ID NO 214;
[0755] uu. a polypeptide having at least 75%, at least 80%, at least 85%, at least 86%, at least 87%, at least 88%, at least 89%, at least 90%, at least 91%, at least 92%, at least 93%, at least 94%, at least 95%, at least 96%, at least 97%, at least 98%, at least 99%, or 100% sequence identity to SEQ ID NO 215;
[0756] vv. a polypeptide having at least 75%, at least 80%, at least 85%, at least 86%, at least 87%, at least 88%, at least 89%, at least 90%, at least 91%, at least 92%, at least 93%, at least 94%, at least 95%, at least 96%, at least 97%, at least 98%, at least 99%, or 100% sequence identity to SEQ ID NO 216;
[0757] ww. a polypeptide having at least 75%, at least 80%, at least 85%, at least 86%, at least 87%, at least 88%, at least 89%, at least 90%, at least 91%, at least 92%, at least 93%, at least 94%, at least 95%, at least 96%, at least 97%, at least 98%, at least 99%, or 100% sequence identity to SEQ ID NO 217;
[0758] xx. a polypeptide having at least 75%, at least 80%, at least 85%, at least 86%, at least 87%, at least 88%, at least 89%, at least 90%, at least 91%, at least 92%, at least 93%, at least 94%, at least 95%, at least 96%, at least 97%, at least 98%, at least 99%, or 100% sequence identity to SEQ ID NO 218;
[0759] yy. a polypeptide having at least 75%, at least 80%, at least 85%, at least 86%, at least 87%, at least 88%, at least 89%, at least 90%, at least 91%, at least 92%, at least 93%, at least 94%, at least 95%, at least 96%, at least 97%, at least 98%, at least 99%, or 100% sequence identity to SEQ ID NO 219;
[0760] zz. a polypeptide having at least 75%, at least 80%, at least 85%, at least 86%, at least 87%, at least 88%, at least 89%, at least 90%, at least 91%, at least 92%, at least 93%, at least 94%, at least 95%, at least 96%, at least 97%, at least 98%, at least 99%, or 100% sequence identity to SEQ ID NO 220;
[0761] aaa. a polypeptide having at least 75%, at least 80%, at least 85%, at least 86%, at least 87%, at least 88%, at least 89%, at least 90%, at least 91%, at least 92%, at least 93%, at least 94%, at least 95%, at least 96%, at least 97%, at least 98%, at least 99%, or 100% sequence identity to SEQ ID NO 238;
[0762] bbb. a polypeptide having at least 75%, at least 80%, at least 85%, at least 86%, at least 87%, at least 88%, at least 89%, at least 90%, at least 91%, at least 92%, at least 93%, at least 94%, at least 95%, at least 96%, at least 97%, at least 98%, at least 99%, or 100% sequence identity to SEQ ID NO 239;
[0763] ccc. a polypeptide having at least 75%, at least 80%, at least 85%, at least 86%, at least 87%, at least 88%, at least 89%, at least 90%, at least 91%, at least 92%, at least 93%, at least 94%, at least 95%, at least 96%, at least 97%, at least 98%, at least 99%, or 100% sequence identity to SEQ ID NO 240;
[0764] ddd. a polypeptide having at least 75%, at least 80%, at least 85%, at least 86%, at least 87%, at least 88%, at least 89%, at least 90%, at least 91%, at least 92%, at least 93%, at least 94%, at least 95%, at least 96%, at least 97%, at least 98%, at least 99%, or 100% sequence identity to SEQ ID NO 241;
[0765] eee. a polypeptide having at least 75%, at least 80%, at least 85%, at least 86%, at least 87%, at least 88%, at least 89%, at least 90%, at least 91%, at least 92%, at least 93%, at least 94%, at least 95%, at least 96%, at least 97%, at least 98%, at least 99%, or 100% sequence identity to SEQ ID NO 242; and
[0766] fff. a polypeptide having at least 75%, at least 80%, at least 85%, at least 86%, at least 87%, at least 88%, at least 89%, at least 90%, at least 91%, at least 92%, at least 93%, at least 94%, at least 95%, at least 96%, at least 97%, at least 98%, at least 99%, or 100% sequence identity to SEQ ID NO 243.
[0767] The polypeptide of fungal origin having superoxide dismutase activity may be selected from the group consisting of
   [0768] a. a polypeptide having at least 75%, at least 80%, at least 85%, at least 86%, at least 87%, at least 88%, at least 89%, at least 90%, at least 91%, at least 92%, at least 93%, at least 94%, at least 95%, at least 96%, at least 97%, at least 98%, at least 99%, or 100% sequence identity to amino acid residues 21 to 307 of SEQ ID NO 83;
   [0769] b. a polypeptide having at least 75%, at least 80%, at least 85%, at least 86%, at least 87%, at least 88%, at least 89%, at least 90%, at least 91%, at least 92%, at least 93%, at least 94%, at least 95%, at least 96%, at least 97%, at least 98%, at least 99%, or 100% sequence identity to amino acid residues 21 to 206 of SEQ ID NO 84;
   [0770] c. a polypeptide having at least 75%, at least 80%, at least 85%, at least 86%, at least 87%, at least 88%, at least 89%, at least 90%, at least 91%, at least 92%, at least 93%, at least 94%, at least 95%, at least 96%, at least 97%, at least 98%, at least 99%, or 100% sequence identity to amino acid residues 17 to 154 of SEQ ID NO 85;
   [0771] d. a polypeptide having at least 75%, at least 80%, at least 85%, at least 86%, at least 87%, at least 88%, at least 89%, at least 90%, at least 91%, at least 92%, at least 93%, at least 94%, at least 95%, at least 96%, at least 97%, at least 98%, at least 99%, or 100% sequence identity to amino acid residues 20 to 188 of SEQ ID NO 86;
   [0772] e. a polypeptide having at least 75%, at least 80%, at least 85%, at least 86%, at least 87%, at least 88%, at least 89%, at least 90%, at least 91%, at least 92%, at least 93%, at least 94%, at least 95%, at least 96%, at least 97%, at least 98%, at least 99%, or 100% sequence identity to amino acid residues 19 to 247 of SEQ ID NO 49;
   [0773] f. a polypeptide having at least 75%, at least 80%, at least 85%, at least 86%, at least 87%, at least 88%, at least 89%, at least 90%, at least 91%, at least 92%, at least 93%, at least 94%, at least 95%, at least 96%, at least 97%, at least 98%, at least 99%, or 100% sequence identity to amino acid residues 20 to 184 of SEQ ID NO 50;
   [0774] g. a polypeptide having at least 75%, at least 80%, at least 85%, at least 86%, at least 87%, at least 88%, at least 89%, at least 90%, at least 91%, at least 92%, at least 93%, at least 94%, at least 95%, at least 96%, at least 97%, at least 98%, at least 99%, or 100% sequence identity to amino acid residues 20 to 249 of SEQ ID NO 51;
   [0775] h. a polypeptide having at least 75%, at least 80%, at least 85%, at least 86%, at least 87%, at least 88%, at least 89%, at least 90%, at least 91%, at least 92%, at least 93%, at least 94%, at least 95%, at least 96%, at least 97%, at least 98%, at least 99%, or 100% sequence identity to amino acid residues 19 to 178 of SEQ ID NO 52;
   [0776] i. a polypeptide having at least 75%, at least 80%, at least 85%, at least 86%, at least 87%, at least 88%, at least 89%, at least 90%, at least 91%, at least 92%, at least 93%, at least 94%, at least 95%, at least 96%, at least 97%, at least 98%, at least 99%, or 100% sequence identity to amino acid residues 19 to 248 of SEQ ID NO 53;
   [0777] j. a polypeptide having at least 75%, at least 80%, at least 85%, at least 86%, at least 87%, at least 88%, at least 89%, at least 90%, at least 91%, at least 92%, at least 93%, at least 94%, at least 95%, at least 96%, at least 97%, at least 98%, at least 99%, or 100% sequence identity to amino acid residues 18 to 186 of SEQ ID NO 54;
   [0778] k. a polypeptide having at least 75%, at least 80%, at least 85%, at least 86%, at least 87%, at least 88%, at least 89%, at least 90%, at least 91%, at least 92%, at least 93%, at least 94%, at least 95%, at least 96%, at least 97%, at least 98%, at least 99%, or 100% sequence identity to amino acid residues 19 to 274 of SEQ ID NO 55;
   [0779] l. a polypeptide having at least 75%, at least 80%, at least 85%, at least 86%, at least 87%, at least 88%, at least 89%, at least 90%, at least 91%, at least 92%, at least 93%, at least 94%, at least 95%, at least 96%, at least 97%, at least 98%, at least 99%, or 100% sequence identity to amino acid residues 26 to 257 of SEQ ID NO 56;
   [0780] m. a polypeptide having at least 75%, at least 80%, at least 85%, at least 86%, at least 87%, at least 88%, at least 89%, at least 90%, at least 91%, at least 92%, at least 93%, at least 94%, at least 95%, at least 96%, at least 97%, at least 98%, at least 99%, or 100% sequence identity to amino acid residues 23 to 261 of SEQ ID NO 18;
   [0781] n. a polypeptide having at least 75%, at least 80%, at least 85%, at least 86%, at least 87%, at least 88%, at least 89%, at least 90%, at least 91%, at least 92%, at least 93%, at least 94%, at least 95%, at least 96%, at least 97%, at least 98%, at least 99%, or 100% sequence identity to amino acid residues 19 to 247 of SEQ ID NO 57;
   [0782] o. a polypeptide having at least 75%, at least 80%, at least 85%, at least 86%, at least 87%, at least 88%, at least 89%, at least 90%, at least 91%, at least 92%, at least 93%, at least 94%, at least 95%, at least 96%, at least 97%, at least 98%, at least 99%, or 100% sequence identity to amino acid residues 21 to 269 of SEQ ID NO 58;
   [0783] p. a polypeptide having at least 75%, at least 80%, at least 85%, at least 86%, at least 87%, at least 88%, at least 89%, at least 90%, at least 91%, at least 92%, at least 93%, at least 94%, at least 95%, at least 96%, at least 97%, at least 98%, at least 99%, or 100% sequence identity to amino acid residues 1 to 151 of SEQ ID NO 59,
   [0784] q. a polypeptide having at least 75%, at least 80%, at least 85%, at least 86%, at least 87%, at least 88%, at least 89%, at least 90%, at least 91%, at least 92%, at least 93%, at least 94%, at least 95%, at least 96%, at least 97%, at least 98%, at least 99%, or 100% sequence identity to amino acid residues 33 to 228 of SEQ ID NO 60,
   [0785] r. a polypeptide having at least 75%, at least 80%, at least 85%, at least 86%, at least 87%, at least 88%, at least 89%, at least 90%, at least 91%, at least 92%, at least 93%, at least 94%, at least 95%, at least 96%, at least 97%, at least 98%, at least 99%, or 100% sequence identity to amino acid residues 37 to 233 of SEQ ID NO 61;
   [0786] s. a polypeptide having at least 75%, at least 80%, at least 85%, at least 86%, at least 87%, at least 88%, at least 89%, at least 90%, at least 91%, at least 92%, at least 93%, at least 94%, at least 95%, at least 96%, at least 97%, at least 98%, at least 99%, or 100% sequence identity to amino acid residues 33 to 227 of SEQ ID NO 62;
   [0787] t. a polypeptide having at least 75%, at least 80%, at least 85%, at least 86%, at least 87%, at least 88%, at least 89%, at least 90%, at least 91%, at least 92%, at least 93%, at least 94%, at least 95%, at least 96%, at least 97%, at least 98%, at least 99%, or 100% sequence identity to amino acid residues 34 to 230 of SEQ ID NO 63;
   [0788] u. a polypeptide having at least 75%, at least 80%, at least 85%, at least 86%, at least 87%, at least 88%, at least 89%, at least 90%, at least 91%, at least 92%, at least 93%, at least 94%, at least 95%, at least 96%, at least 97%, at least 98%, at least 99%, or 100% sequence identity to amino acid residues 1 to 233 of SEQ ID NO 64;
   [0789] v. a polypeptide having at least 75%, at least 80%, at least 85%, at least 86%, at least 87%, at least 88%, at least 89%, at least 90%, at least 91%, at least 92%, at least 93%, at least 94%, at least 95%, at least 96%, at least 97%, at least 98%, at least 99%, or 100% sequence identity to amino acid residues 25 to 227 of SEQ ID NO 65;
   [0790] w. a polypeptide having at least 75%, at least 80%, at least 85%, at least 86%, at least 87%, at least 88%, at least 89%, at least 90%, at least 91%, at least 92%, at least 93%, at least 94%, at least 95%, at least 96%, at least 97%, at least 98%, at least 99%, or 100% sequence identity to amino acid residues 20 to 211 of SEQ ID NO 66;
   [0791] x. a polypeptide having at least 75%, at least 80%, at least 85%, at least 86%, at least 87%, at least 88%, at least 89%, at least 90%, at least 91%, at least 92%, at least 93%, at least 94%, at least 95%, at least 96%, at least 97%, at least 98%, at least 99%, or 100% sequence identity to amino acid residues 20 to 218 of SEQ ID NO 67;
   [0792] y. a polypeptide having at least 75%, at least 80%, at least 85%, at least 86%, at least 87%, at least 88%, at least 89%, at least 90%, at least 91%, at least 92%, at least 93%, at least 94%, at least 95%, at least 96%, at least 97%, at least 98%, at least 99%, or 100% sequence identity to amino acid residues 21 to 218 of SEQ ID NO 68;
   [0793] z. a polypeptide having at least 75%, at least 80%, at least 85%, at least 86%, at least 87%, at least 88%, at least 89%, at least 90%, at least 91%, at least 92%, at least 93%, at least 94%, at least 95%, at least 96%, at least 97%, at least 98%, at least 99%, or 100% sequence identity to amino acid residues 17 to 182 of SEQ ID NO 69;
   [0794] aa. a polypeptide having at least 75%, at least 80%, at least 85%, at least 86%, at least 87%, at least 88%, at least 89%, at least 90%, at least 91%, at least 92%, at least 93%, at least 94%, at least 95%, at least 96%, at least 97%, at least 98%, at least 99%, or 100% sequence identity to amino acid residues 20 to 185 of SEQ ID NO 70;
   [0795] bb. a polypeptide having at least 75%, at least 80%, at least 85%, at least 86%, at least 87%, at least 88%, at least 89%, at least 90%, at least 91%, at least 92%, at least 93%, at least 94%, at least 95%, at least 96%, at least 97%, at least 98%, at least 99%, or 100% sequence identity to amino acid residues 18 to 185 of SEQ ID NO 71;
   [0796] cc. a polypeptide having at least 75%, at least 80%, at least 85%, at least 86%, at least 87%, at least 88%, at least 89%, at least 90%, at least 91%, at least 92%, at least 93%, at least 94%, at least 95%, at least 96%, at least 97%, at least 98%, at least 99%, or 100% sequence identity to amino acid residues 20 to 280 of SEQ ID NO 35;
   [0797] dd. a polypeptide having at least 75%, at least 80%, at least 85%, at least 86%, at least 87%, at least 88%, at least 89%, at least 90%, at least 91%, at least 92%, at least 93%, at least 94%, at least 95%, at least 96%, at least 97%, at least 98%, at least 99%, or 100% sequence identity to amino acid residues 20 to 304 of SEQ ID NO 37;
   [0798] ee. a polypeptide having at least 75%, at least 80%, at least 85%, at least 86%, at least 87%, at least 88%, at least 89%, at least 90%, at least 91%, at least 92%, at least 93%, at least 94%, at least 95%, at least 96%, at least 97%, at least 98%, at least 99%, or 100% sequence identity to amino acid residues 21 to 310 of SEQ ID NO 72;
   [0799] ff. a polypeptide having at least 75%, at least 80%, at least 85%, at least 86%, at least 87%, at least 88%, at least 89%, at least 90%, at least 91%, at least 92%, at least 93%, at least 94%, at least 95%, at least 96%, at least 97%, at least 98%, at least 99%, or 100% sequence identity to amino acid residues 20 to 303 of SEQ ID NO 73;
   [0800] gg. a polypeptide having at least 75%, at least 80%, at least 85%, at least 86%, at least 87%, at least 88%, at least 89%, at least 90%, at least 91%, at least 92%, at least 93%, at least 94%, at least 95%, at least 96%, at least 97%, at least 98%, at least 99%, or 100% sequence identity to amino acid residues 18 to 186 of SEQ ID NO 74;
   [0801] hh. a polypeptide having at least 75%, at least 80%, at least 85%, at least 86%, at least 87%, at least 88%, at least 89%, at least 90%, at least 91%, at least 92%, at least 93%, at least 94%, at least 95%, at least 96%, at least 97%, at least 98%, at least 99%, or 100% sequence identity to amino acid residues 18 to 186 of SEQ ID NO 75;
   [0802] ii. a polypeptide having at least 75%, at least 80%, at least 85%, at least 86%, at least 87%, at least 88%, at least 89%, at least 90%, at least 91%, at least 92%, at least 93%, at least 94%, at least 95%, at least 96%, at least 97%, at least 98%, at least 99%, or 100% sequence identity to amino acid residues 18 to 209 of SEQ ID NO 76;
   [0803] jj. a polypeptide having at least 75%, at least 80%, at least 85%, at least 86%, at least 87%, at least 88%, at least 89%, at least 90%, at least 91%, at least 92%, at least 93%, at least 94%, at least 95%, at least 96%, at least 97%, at least 98%, at least 99%, or 100% sequence identity to amino acid residues 21 to 209 of SEQ ID NO 77;
   [0804] kk. a polypeptide having at least 75%, at least 80%, at least 85%, at least 86%, at least 87%, at least 88%, at least 89%, at least 90%, at least 91%, at least 92%, at least 93%, at least 94%, at least 95%, at least 96%, at least 97%, at least 98%, at least 99%, or 100% sequence identity to amino acid residues 22 to 183 of SEQ ID NO 78;
   [0805] ll. a polypeptide having at least 75%, at least 80%, at least 85%, at least 86%, at least 87%, at least 88%, at least 89%, at least 90%, at least 91%, at least 92%, at least 93%, at least 94%, at least 95%, at least 96%, at least 97%, at least 98%, at least 99%, or 100% sequence identity to amino acid residues 18 to 193 of SEQ ID NO 79;
   [0806] mm. a polypeptide having at least 75%, at least 80%, at least 85%, at least 86%, at least 87%, at least 88%, at least 89%, at least 90%, at least 91%, at least 92%, at least 93%, at least 94%, at least 95%, at least 96%, at least 97%, at least 98%, at least 99%, or 100% sequence identity to amino acid residues 19 to 177 of SEQ ID NO 80;
   [0807] nn. a polypeptide having at least 75%, at least 80%, at least 85%, at least 86%, at least 87%, at least 88%, at least 89%, at least 90%, at least 91%, at least 92%, at least 93%, at least 94%, at least 95%, at least 96%, at least 97%, at least 98%, at least 99%, or 100% sequence identity to amino acid residues 20 to 280 of SEQ ID NO 81;
   [0808] oo. a polypeptide having at least 75%, at least 80%, at least 85%, at least 86%, at least 87%, at least 88%, at least 89%, at least 90%, at least 91%, at least 92%, at least 93%, at least 94%, at least 95%, at least 96%, at least 97%, at least 98%, at least 99%, or 100% sequence identity to amino acid residues 23 to 215 of SEQ ID NO 82;
   [0809] pp. a polypeptide having at least 75%, at least 80%, at least 85%, at least 86%, at least 87%, at least 88%, at least 89%, at least 90%, at least 91%, at least 92%, at least 93%, at least 94%, at least 95%, at least 96%, at least 97%, at least 98%, at least 99%, or 100% sequence identity to amino acid residues 20 to 181 of SEQ ID NO 210;
   [0810] qq. a polypeptide having at least 75%, at least 80%, at least 85%, at least 86%, at least 87%, at least 88%, at least 89%, at least 90%, at least 91%, at least 92%, at least 93%, at least 94%, at least 95%, at least 96%, at least 97%, at least 98%, at least 99%, or 100% sequence identity to amino acid residues 20 to 181 of SEQ ID NO 211;
   [0811] rr. a polypeptide having at least 75%, at least 80%, at least 85%, at least 86%, at least 87%, at least 88%, at least 89%, at least 90%, at least 91%, at least 92%, at least 93%, at least 94%, at least 95%, at least 96%, at least 97%, at least 98%, at least 99%, or 100% sequence identity to amino acid residues 20 to 182 of SEQ ID NO 212;
   [0812] ss. a polypeptide having at least 75%, at least 80%, at least 85%, at least 86%, at least 87%, at least 88%, at least 89%, at least 90%, at least 91%, at least 92%, at least 93%, at least 94%, at least 95%, at least 96%, at least 97%, at least 98%, at least 99%, or 100% sequence identity to amino acid residues 20 to 154 of SEQ ID NO 213;
   [0813] tt. a polypeptide having at least 75%, at least 80%, at least 85%, at least 86%, at least 87%, at least 88%, at least 89%, at least 90%, at least 91%, at least 92%, at least 93%, at least 94%, at least 95%, at least 96%, at least 97%, at least 98%, at least 99%, or 100% sequence identity to amino acid residues 1 to 154 of SEQ ID NO 214;
   [0814] uu. a polypeptide having at least 75%, at least 80%, at least 85%, at least 86%, at least 87%, at least 88%, at least 89%, at least 90%, at least 91%, at least 92%, at least 93%, at least 94%, at least 95%, at least 96%, at least 97%, at least 98%, at least 99%, or 100% sequence identity to amino acid residues 1 to 154 of SEQ ID NO 215;
   [0815] vv. a polypeptide having at least 75%, at least 80%, at least 85%, at least 86%, at least 87%, at least 88%, at least 89%, at least 90%, at least 91%, at least 92%, at least 93%, at least 94%, at least 95%, at least 96%, at least 97%, at least 98%, at least 99%, or 100% sequence identity to amino acid residues 1 to 150 of SEQ ID NO 216;
   [0816] ww. a polypeptide having at least 75%, at least 80%, at least 85%, at least 86%, at least 87%, at least 88%, at least 89%, at least 90%, at least 91%, at least 92%, at least 93%, at least 94%, at least 95%, at least 96%, at least 97%, at least 98%, at least 99%, or 100% sequence identity to amino acid residues 21 to 247 of SEQ ID NO 217;
   [0817] xx. a polypeptide having at least 75%, at least 80%, at least 85%, at least 86%, at least 87%, at least 88%, at least 89%, at least 90%, at least 91%, at least 92%, at least 93%, at least 94%, at least 95%, at least 96%, at least 97%, at least 98%, at least 99%, or 100% sequence identity to amino acid residues 21 to 154 of SEQ ID NO 218;
   [0818] yy. a polypeptide having at least 75%, at least 80%, at least 85%, at least 86%, at least 87%, at least 88%, at least 89%, at least 90%, at least 91%, at least 92%, at least 93%, at least 94%, at least 95%, at least 96%, at least 97%, at least 98%, at least 99%, or 100% sequence identity to amino acid residues 21 to 316 of SEQ ID NO 219;
   [0819] zz. a polypeptide having at least 75%, at least 80%, at least 85%, at least 86%, at least 87%, at least 88%, at least 89%, at least 90%, at least 91%, at least 92%, at least 93%, at least 94%, at least 95%, at least 96%, at least 97%, at least 98%, at least 99%, or 100% sequence identity to amino acid residues 21 to 193 of SEQ ID NO 220;
   [0820] aaa. a polypeptide having at least 75%, at least 80%, at least 85%, at least 86%, at least 87%, at least 88%, at least 89%, at least 90%, at least 91%, at least 92%, at least 93%, at least 94%, at least 95%, at least 96%, at least 97%, at least 98%, at least 99%, or 100% sequence identity to amino acid residues 18 to 186 of SEQ ID NO 238;
   [0821] bbb. a polypeptide having at least 75%, at least 80%, at least 85%, at least 86%, at least 87%, at least 88%, at least 89%, at least 90%, at least 91%, at least 92%, at least 93%, at least 94%, at least 95%, at least 96%, at least 97%, at least 98%, at least 99%, or 100% sequence identity to amino acid residues 14 to 164 of SEQ ID NO 239;
   [0822] ccc. a polypeptide having at least 75%, at least 80%, at least 85%, at least 86%, at least 87%, at least 88%, at least 89%, at least 90%, at least 91%, at least 92%, at least 93%, at least 94%, at least 95%, at least 96%, at least 97%, at least 98%, at least 99%, or 100% sequence identity to amino acid residues 18 to 184 of SEQ ID NO 240;
   [0823] ddd. a polypeptide having at least 75%, at least 80%, at least 85%, at least 86%, at least 87%, at least 88%, at least 89%, at least 90%, at least 91%, at least 92%, at least 93%, at least 94%, at least 95%, at least 96%, at least 97%, at least 98%, at least 99%, or 100% sequence identity to amino acid residues 19 to 242 of SEQ ID NO 241;
   [0824] eee. a polypeptide having at least 75%, at least 80%, at least 85%, at least 86%, at least 87%, at least 88%, at least 89%, at least 90%, at least 91%, at least 92%, at least 93%, at least 94%, at least 95%, at least 96%, at least 97%, at least 98%, at least 99%, or 100% sequence identity to amino acid residues 18 to 261 of SEQ ID NO 242; and
   [0825] fff. a polypeptide having at least 75%, at least 80%, at least 85%, at least 86%, at least 87%, at least 88%, at least 89%, at least 90%, at least 91%, at least 92%, at least 93%, at least 94%, at least 95%, at least 96%, at least 97%, at least 98%, at least 99%, or 100% sequence identity to amino acid residues 19 to 258 of SEQ ID NO 243.
[0826] The polypeptide of fungal origin having superoxide dismutase activity may be selected from the group consisting
   [0827] a. a polypeptide encoded by a polynucleotide having at least 80%, at least 85%, at least 90%, at least 91%, at least 92%, at least 93%, at least 94%, at least 95%, at least 96%, at least 97%, at least 98%, at least 99% or 100% sequence identity to the polypeptide coding sequence of SEQ ID NO 5;
   [0828] b. a polypeptide encoded by a polynucleotide having at least 80%, at least 85%, at least 90%, at least 91%, at least 92%, at least 93%, at least 94%, at least 95%, at least 96%, at least 97%, at least 98%, at least 99% or 100% sequence identity to the polypeptide coding sequence of SEQ ID NO 87;
   [0829] c. a polypeptide encoded by a polynucleotide having at least 80%, at least 85%, at least 90%, at least 91%, at least 92%, at least 93%, at least 94%, at least 95%, at least 96%, at least 97%, at least 98%, at least 99% or 100% sequence identity to the polypeptide coding sequence of SEQ ID NO 88;
   [0830] d. a polypeptide encoded by a polynucleotide having at least 80%, at least 85%, at least 90%, at least 91%, at least 92%, at least 93%, at least 94%, at least 95%, at least 96%, at least 97%, at least 98%, at least 99% or 100% sequence identity to the polypeptide coding sequence of SEQ ID NO 89;
   [0831] e. a polypeptide encoded by a polynucleotide having at least 80%, at least 85%, at least 90%, at least 91%, at least 92%, at least 93%, at least 94%, at least 95%, at least 96%, at least 97%, at least 98%, at least 99% or 100% sequence identity to the polypeptide coding sequence of SEQ ID NO 90;
   [0832] f. a polypeptide encoded by a polynucleotide having at least 80%, at least 85%, at least 90%, at least 91%, at least 92%, at least 93%, at least 94%, at least 95%, at least 96%, at least 97%, at least 98%, at least 99% or 100% sequence identity to the polypeptide coding sequence of SEQ ID NO 91;
   [0833] g. a polypeptide encoded by a polynucleotide having at least 80%, at least 85%, at least 90%, at least 91%, at least 92%, at least 93%, at least 94%, at least 95%, at least 96%, at least 97%, at least 98%, at least 99% or 100% sequence identity to the polypeptide coding sequence of SEQ ID NO 92;
   [0834] h. a polypeptide encoded by a polynucleotide having at least 80%, at least 85%, at least 90%, at least 91%, at least 92%, at least 93%, at least 94%, at least 95%, at least 96%, at least 97%, at least 98%, at least 99% or 100% sequence identity to the polypeptide coding sequence of SEQ ID NO 93;
   [0835] i. a polypeptide encoded by a polynucleotide having at least 80%, at least 85%, at least 90%, at least 91%, at least 92%, at least 93%, at least 94%, at least 95%, at least 96%, at least 97%, at least 98%, at least 99% or 100% sequence identity to the polypeptide coding sequence of SEQ ID NO 94;
   [0836] j. a polypeptide encoded by a polynucleotide having at least 80%, at least 85%, at least 90%, at least 91%, at least 92%, at least 93%, at least 94%, at least 95%, at least 96%, at least 97%, at least 98%, at least 99% or 100% sequence identity to the polypeptide coding sequence of SEQ ID NO 95;
   [0837] k. a polypeptide encoded by a polynucleotide having at least 80%, at least 85%, at least 90%, at least 91%, at least 92%, at least 93%, at least 94%, at least 95%, at least 96%, at least 97%, at least 98%, at least 99% or 100% sequence identity to the polypeptide coding sequence of SEQ ID NO 96;
   [0838] l. a polypeptide encoded by a polynucleotide having at least 80%, at least 85%, at least 90%, at least 91%, at least 92%, at least 93%, at least 94%, at least 95%, at least 96%, at least 97%, at least 98%, at least 99% or 100% sequence identity to the polypeptide coding sequence of SEQ ID NO 97;
   [0839] m. a polypeptide encoded by a polynucleotide having at least 80%, at least 85%, at least 90%, at least 91%, at least 92%, at least 93%, at least 94%, at least 95%, at least 96%, at least 97%, at least 98%, at least 99% or 100% sequence identity to the polypeptide coding sequence of SEQ ID NO 98;
   [0840] n. a polypeptide encoded by a polynucleotide having at least 80%, at least 85%, at least 90%, at least 91%, at least 92%, at least 93%, at least 94%, at least 95%, at least 96%, at least 97%, at least 98%, at least 99% or 100% sequence identity to the polypeptide coding sequence of SEQ ID NO 99;
   [0841] o. a polypeptide encoded by a polynucleotide having at least 80%, at least 85%, at least 90%, at least 91%, at least 92%, at least 93%, at least 94%, at least 95%, at least 96%, at least 97%, at least 98%, at least 99% or 100% sequence identity to the polypeptide coding sequence of SEQ ID NO 100;
   [0842] p. a polypeptide encoded by a polynucleotide having at least 80%, at least 85%, at least 90%, at least 91%, at least 92%, at least 93%, at least 94%, at least 95%, at least 96%, at least 97%, at least 98%, at least 99% or 100% sequence identity to the polypeptide coding sequence of SEQ ID NO 101;
   [0843] q. a polypeptide encoded by a polynucleotide having at least 80%, at least 85%, at least 90%, at least 91%, at least 92%, at least 93%, at least 94%, at least 95%, at least 96%, at least 97%, at least 98%, at least 99% or 100% sequence identity to the polypeptide coding sequence of SEQ ID NO 102;
   [0844] r. a polypeptide encoded by a polynucleotide having at least 80%, at least 85%, at least 90%, at least 91%, at least 92%, at least 93%, at least 94%, at least 95%, at least 96%, at least 97%, at least 98%, at least 99% or 100% sequence identity to the polypeptide coding sequence of SEQ ID NO 127;
   [0845] s. a polypeptide encoded by a polynucleotide having at least 80%, at least 85%, at least 90%, at least 91%, at least 92%, at least 93%, at least 94%, at least 95%, at least 96%, at least 97%, at least 98%, at least 99% or 100% sequence identity to the polypeptide coding sequence of SEQ ID NO 128;
   [0846] t. a polypeptide encoded by a polynucleotide having at least 80%, at least 85%, at least 90%, at least 91%, at least 92%, at least 93%, at least 94%, at least 95%, at least 96%, at least 97%, at least 98%, at least 99% or 100% sequence identity to the polypeptide coding sequence of SEQ ID NO 129;
   [0847] u. a polypeptide encoded by a polynucleotide having at least 80%, at least 85%, at least 90%, at least 91%, at least 92%, at least 93%, at least 94%, at least 95%, at least 96%, at least 97%, at least 98%, at least 99% or 100% sequence identity to the polypeptide coding sequence of SEQ ID NO 130;
   [0848] v. a polypeptide encoded by a polynucleotide having at least 80%, at least 85%, at least 90%, at least 91%, at least 92%, at least 93%, at least 94%, at least 95%, at least 96%, at least 97%, at least 98%, at least 99% or 100% sequence identity to the polypeptide coding sequence of SEQ ID NO 131;
   [0849] w. a polypeptide encoded by a polynucleotide having at least 80%, at least 85%, at least 90%, at least 91%, at least 92%, at least 93%, at least 94%, at least 95%, at least 96%, at least 97%, at least 98%, at least 99% or 100% sequence identity to the polypeptide coding sequence of SEQ ID NO 132;
   [0850] x. a polypeptide encoded by a polynucleotide having at least 80%, at least 85%, at least 90%, at least 91%, at least 92%, at least 93%, at least 94%, at least 95%, at least 96%, at least 97%, at least 98%, at least 99% or 100% sequence identity to the polypeptide coding sequence of SEQ ID NO 133;
   [0851] y. a polypeptide encoded by a polynucleotide having at least 80%, at least 85%, at least 90%, at least 91%, at least 92%, at least 93%, at least 94%, at least 95%, at least 96%, at least 97%, at least 98%, at least 99% or 100% sequence identity to the polypeptide coding sequence of SEQ ID NO 134;
   [0852] z. a polypeptide encoded by a polynucleotide having at least 80%, at least 85%, at least 90%, at least 91%, at least 92%, at least 93%, at least 94%, at least 95%, at least 96%, at least 97%, at least 98%, at least 99% or 100% sequence identity to the polypeptide coding sequence of SEQ ID NO 135;
   [0853] aa. a polypeptide encoded by a polynucleotide having at least 80%, at least 85%, at least 90%, at least 91%, at least 92%, at least 93%, at least 94%, at least 95%, at least 96%, at least 97%, at least 98%, at least 99% or 100% sequence identity to the polypeptide coding sequence of SEQ ID NO 136;
   [0854] bb. a polypeptide encoded by a polynucleotide having at least 80%, at least 85%, at least 90%, at least 91%, at least 92%, at least 93%, at least 94%, at least 95%, at least 96%, at least 97%, at least 98%, at least 99% or 100% sequence identity to the polypeptide coding sequence of SEQ ID NO 137;
   [0855] cc. a polypeptide encoded by a polynucleotide having at least 80%, at least 85%, at least 90%, at least 91%, at least 92%, at least 93%, at least 94%, at least 95%, at least 96%, at least 97%, at least 98%, at least 99% or 100% sequence identity to the polypeptide coding sequence of SEQ ID NO 138;
   [0856] dd. a polypeptide encoded by a polynucleotide having at least 80%, at least 85%, at least 90%, at least 91%, at least 92%, at least 93%, at least 94%, at least 95%, at least 96%, at least 97%, at least 98%, at least 99% or 100% sequence identity to the polypeptide coding sequence of SEQ ID NO 139;
   [0857] ee. a polypeptide encoded by a polynucleotide having at least 80%, at least 85%, at least 90%, at least 91%, at least 92%, at least 93%, at least 94%, at least 95%, at least 96%, at least 97%, at least 98%, at least 99% or 100% sequence identity to the polypeptide coding sequence of SEQ ID NO 140;
   [0858] ff. a polypeptide encoded by a polynucleotide having at least 80%, at least 85%, at least 90%, at least 91%, at least 92%, at least 93%, at least 94%, at least 95%, at least 96%, at least 97%, at least 98%, at least 99% or 100% sequence identity to the polypeptide coding sequence of SEQ ID NO 141;
   [0859] gg. a polypeptide encoded by a polynucleotide having at least 80%, at least 85%, at least 90%, at least 91%, at least 92%, at least 93%, at least 94%, at least 95%, at least 96%, at least 97%, at least 98%, at least 99% or 100% sequence identity to the polypeptide coding sequence of SEQ ID NO 142;
   [0860] hh. a polypeptide encoded by a polynucleotide having at least 80%, at least 85%, at least 90%, at least 91%, at least 92%, at least 93%, at least 94%, at least 95%, at least 96%, at least 97%, at least 98%, at least 99% or 100% sequence identity to the polypeptide coding sequence of SEQ ID NO 143;
   [0861] ii. a polypeptide encoded by a polynucleotide having at least 80%, at least 85%, at least 90%, at least 91%, at least 92%, at least 93%, at least 94%, at least 95%, at least 96%, at least 97%, at least 98%, at least 99% or 100% sequence identity to the polypeptide coding sequence of SEQ ID NO 144;
   [0862] jj. a polypeptide encoded by a polynucleotide having at least 80%, at least 85%, at least 90%, at least 91%, at least 92%, at least 93%, at least 94%, at least 95%, at least 96%, at least 97%, at least 98%, at least 99% or 100% sequence identity to the polypeptide coding sequence of SEQ ID NO 145;
   [0863] kk. a polypeptide encoded by a polynucleotide having at least 80%, at least 85%, at least 90%, at least 91%, at least 92%, at least 93%, at least 94%, at least 95%, at least 96%, at least 97%, at least 98%, at least 99% or 100% sequence identity to the polypeptide coding sequence of SEQ ID NO 146;
   [0864] ll. a polypeptide encoded by a polynucleotide having at least 80%, at least 85%, at least 90%, at least 91%, at least 92%, at least 93%, at least 94%, at least 95%, at least 96%, at least 97%, at least 98%, at least 99% or 100% sequence identity to the polypeptide coding sequence of SEQ ID NO 147;
   [0865] mm. a polypeptide encoded by a polynucleotide having at least 80%, at least 85%, at least 90%, at least 91%, at least 92%, at least 93%, at least 94%, at least 95%, at least 96%, at least 97%, at least 98%, at least 99% or 100% sequence identity to the polypeptide coding sequence of SEQ ID NO 148;
   [0866] nn. a polypeptide encoded by a polynucleotide having at least 80%, at least 85%, at least 90%, at least 91%, at least 92%, at least 93%, at least 94%, at least 95%, at least 96%, at least 97%, at least 98%, at least 99% or 100% sequence identity to the polypeptide coding sequence of SEQ ID NO 149;
   [0867] oo. a polypeptide encoded by a polynucleotide having at least 80%, at least 85%, at least 90%, at least 91%, at least 92%, at least 93%, at least 94%, at least 95%, at least 96%, at least 97%, at least 98%, at least 99% or 100% sequence identity to the polypeptide coding sequence of SEQ ID NO 150;
   [0868] pp. a polypeptide encoded by a polynucleotide having at least 80%, at least 85%, at least 90%, at least 91%, at least 92%, at least 93%, at least 94%, at least 95%, at least 96%, at least 97%, at least 98%, at least 99% or 100% sequence identity to the polypeptide coding sequence of SEQ ID NO 221;
   [0869] qq. a polypeptide encoded by a polynucleotide having at least 80%, at least 85%, at least 90%, at least 91%, at least 92%, at least 93%, at least 94%, at least 95%, at least 96%, at least 97%, at least 98%, at least 99% or 100% sequence identity to the polypeptide coding sequence of SEQ ID NO 222;
   [0870] rr. a polypeptide encoded by a polynucleotide having at least 80%, at least 85%, at least 90%, at least 91%, at least 92%, at least 93%, at least 94%, at least 95%, at least 96%, at least 97%, at least 98%, at least 99% or 100% sequence identity to the polypeptide coding sequence of SEQ ID NO 223;
   [0871] ss. a polypeptide encoded by a polynucleotide having at least 80%, at least 85%, at least 90%, at least 91%, at least 92%, at least 93%, at least 94%, at least 95%, at least 96%, at least 97%, at least 98%, at least 99% or 100% sequence identity to the polypeptide coding sequence of SEQ ID NO 224;
   [0872] tt. a polypeptide encoded by a polynucleotide having at least 80%, at least 85%, at least 90%, at least 91%, at least 92%, at least 93%, at least 94%, at least 95%, at least 96%, at least 97%, at least 98%, at least 99% or 100% sequence identity to the polypeptide coding sequence of SEQ ID NO 225;
   [0873] uu. a polypeptide encoded by a polynucleotide having at least 80%, at least 85%, at least 90%, at least 91%, at least 92%, at least 93%, at least 94%, at least 95%, at least 96%, at least 97%, at least 98%, at least 99% or 100% sequence identity to the polypeptide coding sequence of SEQ ID NO 226;
   [0874] vv. a polypeptide encoded by a polynucleotide having at least 80%, at least 85%, at least 90%, at least 91%, at least 92%, at least 93%, at least 94%, at least 95%, at least 96%, at least 97%, at least 98%, at least 99% or 100% sequence identity to the polypeptide coding sequence of SEQ ID NO 227;
   [0875] ww. a polypeptide encoded by a polynucleotide having at least 80%, at least 85%, at least 90%, at least 91%, at least 92%, at least 93%, at least 94%, at least 95%, at least 96%, at least 97%, at least 98%, at least 99% or 100% sequence identity to the polypeptide coding sequence of 228;
   [0876] xx. a polypeptide encoded by a polynucleotide having at least 80%, at least 85%, at least 90%, at least 91%, at least 92%, at least 93%, at least 94%, at least 95%, at least 96%, at least 97%, at least 98%, at least 99% or 100% sequence identity to the polypeptide coding sequence of SEQ ID NO 229;
   [0877] yy. a polypeptide encoded by a polynucleotide having at least 80%, at least 85%, at least 90%, at least 91%, at least 92%, at least 93%, at least 94%, at least 95%, at least 96%, at least 97%, at least 98%, at least 99% or 100% sequence identity to the polypeptide coding sequence of SEQ ID NO 230;
   [0878] zz. a polypeptide encoded by a polynucleotide having at least 80%, at least 85%, at least 90%, at least 91%, at least 92%, at least 93%, at least 94%, at least 95%, at least 96%, at least 97%, at least 98%, at least 99% or 100% sequence identity to the polypeptide coding sequence of SEQ ID NO 231;
   [0879] aaa. a polypeptide encoded by a polynucleotide having at least 80%, at least 85%, at least 90%, at least 91%, at least 92%, at least 93%, at least 94%, at least 95%, at least 96%, at least 97%, at least 98%, at least 99% or 100% sequence identity to the polypeptide coding sequence of SEQ ID NO 244;
   [0880] bbb. a polypeptide encoded by a polynucleotide having at least 80%, at least 85%, at least 90%, at least 91%, at least 92%, at least 93%, at least 94%, at least 95%, at least 96%, at least 97%, at least 98%, at least 99% or 100% sequence identity to the polypeptide coding sequence of SEQ ID NO SEQ ID NO 245;
   [0881] ccc. a polypeptide encoded by a polynucleotide having at least 80%, at least 85%, at least 90%, at least 91%, at least 92%, at least 93%, at least 94%, at least 95%, at least 96%, at least 97%, at least 98%, at least 99% or 100% sequence identity to the polypeptide coding sequence of SEQ ID NO 246;
   [0882] ddd. a polypeptide encoded by a polynucleotide having at least 80%, at least 85%, at least 90%, at least 91%, at least 92%, at least 93%, at least 94%, at least 95%, at least 96%, at least 97%, at least 98%, at least 99% or 100% sequence identity to the polypeptide coding sequence of SEQ ID NO 247;
   [0883] eee. a polypeptide encoded by a polynucleotide having at least 80%, at least 85%, at least 90%, at least 91%, at least 92%, at least 93%, at least 94%, at least 95%, at least 96%, at least 97%, at least 98%, at least 99% or 100% sequence identity to the polypeptide coding sequence of SEQ ID NO 248; and
   [0884] fff. a polypeptide encoded by a polynucleotide having at least 80%, at least 85%, at least 90%, at least 91%, at least 92%, at least 93%, at least 94%, at least 95%, at least 96%, at least 97%, at least 98%, at least 99% or 100% sequence identity to the polypeptide coding sequence of SEQ ID NO 249.

[0885] As the SODs defined above are novel enzymes, the invention further relates to an isolated polypeptide as defined herein having superoxide dismutase activity.

[0886] The amino acid changes in the sequences disclosed above may be of a minor nature, that is conservative amino acid substitutions or insertions that do not significantly affect the folding and/or activity of the protein; small deletions, typically of 1-30 amino acids; small amino- or carboxyl-terminal extensions, such as an amino-terminal methionine residue; a small linker peptide of up to 20-25 residues; or a small extension that facilitates purification by changing net charge or another function, such as a poly-histidine tract, an antigenic epitope or a binding domain.

[0887] Examples of conservative substitutions are within the groups of basic amino acids (arginine, lysine and histidine), acidic amino acids (glutamic acid and aspartic acid), polar amino acids (glutamine and asparagine), hydrophobic amino acids (leucine, isoleucine and valine), aromatic amino acids (phenylalanine, tryptophan and tyrosine), and small amino acids (glycine, alanine, serine, threonine and methionine). Amino acid substitutions that do not generally alter specific activity are known in the art and are described, for example, by H. Neurath and R. L. Hill, 1979, In, The Proteins, Academic Press, New York. Common substitutions are Ala/Ser, Val/Ile, Asp/Glu, Thr/Ser, Ala/Gly, Ala/Thr, Ser/Asn, Ala/Val, Ser/Gly, Tyr/Phe, Ala/Pro, Lys/Arg, Asp/Asn, Leu/Ile, Leu/Val, Ala/Glu, and Asp/Gly.

[0888] Essential amino acids in the polypeptide can be identified according to procedures known in the art, such as site-directed mutagenesis or alanine-scanning mutagenesis (Cunningham and Wells, 1989, Science 244: 1081-1085). In the latter technique, single alanine mutations are introduced at every residue in the molecule, and the resultant mutant molecules are tested for SOD activity to identify amino acid residues that are critical to the activity of the molecule. See also, Hilton et al., 1996, J. Biol. Chem. 271: 4699-4708. The active site of the enzyme or other biological interaction can also be determined by physical analysis of structure, as determined by such techniques as nuclear magnetic resonance, crystallography, electron diffraction, or photoaffinity labelling, in conjunction with mutation of putative contact site amino acids. See, for example, de Vos et al., 1992, Science 255: 306-312; Smith et al., 1992, J. Mol. Biol. 224: 899-904; Wlodaver et aL, 1992, FEBS Lett. 309: 59-64. The identity of essential amino acids can also be inferred from an alignment with a related polypeptide.

### Sources of Superoxide Dismutases

[0889] The polypeptide of the invention having superoxide dismutase activity is of fungal origin.

[0890] As shown from the Examples, the superoxide dismutase of the invention may be obtainable, may be obtained, may be derived from a superoxide dismutase obtainable from a fungus selected from the group consisting of Trichoderma reesei, Aspergillus versicolor, Aspergillus deflectus, Aspergillus egyptiacus, Westerdykella sp. AS85-2, Aspergillus sp. XZ2669, Preussia terricola, Kionochaeta sp., Metapochonia bulbillosa, Xylomelasma sp. XZ0718, Preussia flanaganii, Cladobotryum sp., Westerdykella sp-46156, Trichoderma hamatum, Mycothermus thermophilus, Cephalotrichiella penicillate, Chaetomium megalocarpum, Chaetomium thermophilum var. thermophilum, Humicola hyalothermophila, Subramaniula anamorphosa, Sphingobacterium sp. T2, Trichoderma rossicum, Trichoderma lixii, Trichoderma sp-54723, Aspergillus niveus, Aspergillus templicola, Pochonia chlamydosporia var. spinulospora, Trichoderma sp-44174, Trichoderma rossicum, Trichoderma sp-54723, Trichoderma sp-44174, Metapochonia suchlasporia, Metarhizium marquandii, Diaporthe nobilis, Tolypocladium sp. XZ2627, Aspergillus japonicus, Metarhizium sp. XZ2431, Armillaria ostoyae, Trichoderma spirale, Aspergillus elegans, Trichoderma sinuosum, Trichoderma virens, Trichoderma harzianum, Fusicolla acetilerea, Plectosphaerella sp. 1-29, Mariannaea punicea, Penicillium oxalicum, Colletotrichum sp-71086, Aspergillus sp. nov. XZ3202, Trichoderma parapiluliferum, Aspergillus sp. nov. XZ3202, Mucor sp. XZ2651, Rhizomucor miehei, Mucor sp. XZ2651, Amphisphaeriaceae-sp 43674, Humicola fuscoatra and Valsaria rubricosa.

[0891] The polypeptide having superoxide dismutase activity may be selected from the group consisting of:

[0892] a. a polypeptide Trichoderma reesei from having at least 75%, at least 80%, at least 85%, at least 86%, at least 87%, at least 88%, at least 89%, at least 90%, at least 91%, at least 92%, at least 93%, at least 94%, at least 95%, at least 96%, at least 97%, at least 98%, at least 99%, or 100% sequence identity to SEQ ID NO: 1;

[0893] b. a polypeptide from Aspergillus versicolor having at least 75%, at least 80%, at least 85%, at least 86%, at least 87%, at least 88%, at least 89%, at least 90%, at least 91%, at least 92%, at least 93%, at least 94%, at least 95%, at least 96%, at least 97%, at least 98%, at least 99%, or 100% sequence identity to SEQ ID NO: 2;

[0894] c. a polypeptide from Aspergillus deflectus having at least 75%, at least 80%, at least 85%, at least 86%, at least 87%, at least 88%, at least 89%, at least 90%, at least 91%, at least 92%, at least 93%, at least 94%, at least 95%, at least 96%, at least 97%, at least 98%, at least 99%, or 100% sequence identity to SEQ ID NO: 3;

[0895] d. a polypeptide from Aspergillus egyptiacus having at least 75%, at least 80%, at least 85%, at least 86%, at least 87%, at least 88%, at least 89%, at least 90%, at least 91%, at least 92%, at least 93%, at least 94%, at least 95%, at least 96%, at least 97%, at least 98%, at least 99%, or 100% sequence identity to SEQ ID NO: 4;

[0896] e. a polypeptide from Westerdykella sp. AS85-2 having at least 75%, at least 80%, at least 85%, at least 86%, at least 87%, at least 88%, at least 89%, at least 90%, at least 91%, at least 92%, at least 93%, at least 94%, at least 95%, at least 96%, at least 97%, at least 98%, at least 99%, or 100% sequence identity to SEQ ID NO: 9;

[0897] f. a polypeptide from Aspergillus sp. XZ2669 having at least 75%, at least 80%, at least 85%, at least 86%, at least 87%, at least 88%, at least 89%, at least 90%, at least 91%, at least 92%, at least 93%, at least 94%, at least 95%, at least 96%, at least 97%, at least 98%, at least 99%, or 100% sequence identity to SEQ ID NO: 10;

[0898] g. a polypeptide from Preussia terricola having at least 75%, at least 80%, at least 85%, at least 86%, at least 87%, at least 88%, at least 89%, at least 90%, at least 91%, at least 92%, at least 93%, at least 94%, at least 95%, at least 96%, at least 97%, at least 98%, at least 99%, or 100% sequence identity to SEQ ID NO: 11;

[0899] h. a polypeptide from Kioochaeta sp. having at least 75%, at least 80%, at least 85%, at least 86%, at least 87%, at least 88%, at least 89%, at least 90%, at least 91%, at least 92%, at least 93%, at least 94%, at least 95%, at least 96%, at least 97%, at least 98%, at least 99%, or 100% sequence identity to SEQ ID NO: 12;

[0900] i. a polypeptide from Kioochaeta sp.having at least 75%, at least 80%, at least 85%, at least 86%, at least 87%, at least 88%, at least 89%, at least 90%, at least 91%, at least 92%, at least 93%, at least 94%, at least 95%, at least 96%, at least 97%, at least 98%, at least 99%, or 100% sequence identity to SEQ ID NO: 13;

[0901] j. a polypeptide from Metapochonia bulbillosa having at least 75%, at least 80%, at least 85%, at least 86%, at least 87%, at least 88%, at least 89%, at least 90%, at least 91%, at least 92%, at least 93%, at least 94%, at least 95%, at least 96%, at least 97%, at least 98%, at least 99%, or 100% sequence identity to SEQ ID NO: 14;

[0902] k. a polypeptide from Xylomelasma sp. XZ0718 having at least 75%, at least 80%, at least 85%, at least 86%, at least 87%, at least 88%, at least 89%, at least 90%, at least 91%, at least 92%, at least 93%, at least 94%, at least 95%, at least 96%, at least 97%, at least 98%, at least 99%, or 100% sequence identity to SEQ ID NO: 15;

[0903] l. a polypeptide from Preussia flanaganii having at least 75%, at least 80%, at least 85%, at least 86%, at least 87%, at least 88%, at least 89%, at least 90%, at least 91%, at least 92%, at least 93%, at least 94%, at least 95%, at least 96%, at least 97%, at least 98%, at least 99%, or 100% sequence identity to SEQ ID NO: 16;

[0904] m. a polypeptide from Cladobotryum sp. having at least 75%, at least 80%, at least 85%, at least 86%, at least 87%, at least 88%, at least 89%, at least 90%, at least 91%, at least 92%, at least 93%, at least 94%, at least 95%, at least 96%, at least 97%, at least 98%, at least 99%, or 100% sequence identity to SEQ ID NO: 17;

[0905] n. a polypeptide from Westerdykella sp-46156 having at least 75%, at least 80%, at least 85%, at least 86%, at least 87%, at least 88%, at least 89%, at least 90%, at least 91%, at least 92%, at least 93%, at least 94%, at least 95%, at least 96%, at least 97%, at least 98%, at least 99%, or 100% sequence identity to SEQ ID NO: 19;

[0906] o. a polypeptide from Trichoderma hamatum having at least 75%, at least 80%, at least 85%, at least 86%, at least 87%, at least 88%, at least 89%, at least 90%, at least 91%, at least 92%, at least 93%, at least 94%, at least 95%, at least 96%, at least 97%, at least 98%, at least 99%, or 100% sequence identity to SEQ ID NO: 20;

[0907] p. a polypeptide from Mycothermus thermophilus having at least 75%, at least 80%, at least 85%, at least 86%, at least 87%, at least 88%, at least 89%, at least 90%, at least 91%, at least 92%, at least 93%, at least 94%, at least 95%, at least 96%, at least 97%, at least 98%, at least 99%, or 100% sequence identity to SEQ ID NO: 21;

[0908] q. a polypeptide from Cephalotrichiella penicillata having at least 75%, at least 80%, at least 85%, at least 86%, at least 87%, at least 88%, at least 89%, at least 90%, at least 91%, at least 92%, at least 93%, at least 94%, at least 95%, at least 96%, at least 97%, at least 98%, at least 99%, or 100% sequence identity to SEQ ID NO: 22;

[0909] r. a polypeptide from Chaetomium megalocarpum having at least 75%, at least 80%, at least 85%, at least 86%, at least 87%, at least 88%, at least 89%, at least 90%, at least 91%, at least 92%, at least 93%, at least 94%, at least 95%, at least 96%, at least 97%, at least 98%, at least 99%, or 100% sequence identity to SEQ ID NO: 23;

[0910] s. a polypeptide from Chaetomium thermophilum var. thermophilum having at least 75%, at least 80%, at least 85%, at least 86%, at least 87%, at least 88%, at least 89%, at least 90%, at least 91%, at least 92%, at least 93%, at least 94%, at least 95%, at least 96%, at least 97%, at least 98%, at least 99%, or 100% sequence identity to SEQ ID NO: 24;

[0911] t. a polypeptide from Humicola hyalothermophila having at least 75%, at least 80%, at least 85%, at least 86%, at least 87%, at least 88%, at least 89%, at least 90%, at least 91%, at least 92%, at least 93%, at least 94%, at least 95%, at least 96%, at least 97%, at least 98%, at least 99%, or 100% sequence identity to SEQ ID NO: 25;

[0912] u. a polypeptide from Subramaniula anamorphosa having at least 75%, at least 80%, at least 85%, at least 86%, at least 87%, at least 88%, at least 89%, at least 90%, at least 91%, at least 92%, at least 93%, at least 94%, at least 95%, at least 96%, at least 97%, at least 98%, at least 99%, or 100% sequence identity to SEQ ID NO: 26;

[0913] v. a polypeptide from Sphingobacterium sp. T2 having at least 75%, at least 80%, at least 85%, at least 86%, at least 87%, at least 88%, at least 89%, at least 90%, at least 91%, at least 92%, at least 93%, at least 94%, at least 95%, at least 96%, at least 97%, at least 98%, at least 99%, or 100% sequence identity to SEQ ID NO: 27;

[0914] w. a polypeptide from Trichoderma rossicum having at least 75%, at least 80%, at least 85%, at least 86%, at least 87%, at least 88%, at least 89%, at least 90%, at least 91%, at least 92%, at least 93%, at least 94%, at least 95%, at least 96%, at least 97%, at least 98%, at least 99%, or 100% sequence identity to SEQ ID NO: 28;

[0915] x. a polypeptide from Trichoderma lixii having at least 75%, at least 80%, at least 85%, at least 86%, at least 87%, at least 88%, at least 89%, at least 90%, at least 91%, at least 92%, at least 93%, at least 94%, at least 95%, at least 96%, at least 97%, at least 98%, at least 99%, or 100% sequence identity to SEQ ID NO: 29;

[0916] y. a polypeptide from Trichoderma sp-54723 having at least 75%, at least 80%, at least 85%, at least 86%, at least 87%, at least 88%, at least 89%, at least 90%, at least 91%, at least 92%, at least 93%, at least 94%, at least 95%, at least 96%, at least 97%, at least 98%, at least 99%, or 100% sequence identity to SEQ ID NO: 30;

[0917] z. a polypeptide from Aspergillus niveus having at least 75%, at least 80%, at least 85%, at least 86%, at least 87%, at least 88%, at least 89%, at least 90%, at least 91%, at least 92%, at least 93%, at least 94%, at least 95%, at least 96%, at least 97%, at least 98%, at least 99%, or 100% sequence identity to SEQ ID NO: 31;

[0918] aa. a polypeptide from Aspergillus templicola having at least 75%, at least 80%, at least 85%, at least 86%, at least 87%, at least 88%, at least 89%, at least 90%, at least 91%, at least 92%, at least 93%, at least 94%, at least 95%, at least 96%, at least 97%, at least 98%, at least 99%, or 100% sequence identity to SEQ ID NO: 32;

[0919] bb. a polypeptide from Pochonia chlamydosporia var. spinulospora having at least 75%, at least 80%, at least 85%, at least 86%, at least 87%, at least 88%, at least 89%, at least 90%, at least 91%, at least 92%, at least 93%, at least 94%, at least 95%, at least 96%, at least 97%, at least 98%, at least 99%, or 100% sequence identity to SEQ ID NO: 33;

[0920] cc. a polypeptide from Trichoderma sp-44174 having at least 75%, at least 80%, at least 85%, at least 86%, at least 87%, at least 88%, at least 89%, at least 90%, at least 91%, at least 92%, at least 93%, at least 94%, at least 95%, at least 96%, at least 97%, at least 98%, at least 99%, or 100% sequence identity to SEQ ID NO: 34;

[0921] dd. a polypeptide from Trichoderma rossicum having at least 75%, at least 80%, at least 85%, at least 86%, at least 87%, at least 88%, at least 89%, at least 90%, at least 91%, at least 92%, at least 93%, at least 94%, at least 95%, at least 96%, at least 97%, at least 98%, at least 99%, or 100% sequence identity to SEQ ID NO: 36;

[0922] ee. a polypeptide from Trichoderma rossicum having at least 75%, at least 80%, at least 85%, at least 86%, at least 87%, at least 88%, at least 89%, at least 90%, at least 91%, at least 92%, at least 93%, at least 94%, at least 95%, at least 96%, at least 97%, at least 98%, at least 99%, or 100% sequence identity to SEQ ID NO: 38;

[0923] ff. a polypeptide from Trichoderma sp-44174 having at least 75%, at least 80%, at least 85%, at least 86%, at least 87%, at least 88%, at least 89%, at least 90%, at least 91%, at least 92%, at least 93%, at least 94%, at least 95%, at least 96%, at least 97%, at least 98%, at least 99%, or 100% sequence identity to SEQ ID NO: 39;

[0924] gg. a polypeptide from Metapochonia suchlasporia having at least 75%, at least 80%, at least 85%, at least 86%, at least 87%, at least 88%, at least 89%, at least 90%, at least 91%, at least 92%, at least 93%, at least 94%, at least 95%, at least 96%, at least 97%, at least 98%, at least 99%, or 100% sequence identity to SEQ ID NO: 40;

[0925] hh. a polypeptide from Metarhizium marquandii having at least 75%, at least 80%, at least 85%, at least 86%, at least 87%, at least 88%, at least 89%, at least 90%, at least 91%, at least 92%, at least 93%, at least 94%, at least 95%, at least 96%, at least 97%, at least 98%, at least 99%, or 100% sequence identity to SEQ ID NO: 41;

[0926] ii. a polypeptide from Diaporthe nobilis having at least 75%, at least 80%, at least 85%, at least 86%, at least 87%, at least 88%, at least 89%, at least 90%, at least 91%, at least 92%, at least 93%, at least 94%, at least 95%, at least 96%, at least 97%, at least 98%, at least 99%, or 100% sequence identity to SEQ ID NO: 42;

[0927] jj. a polypeptide from Tolypocladium sp. XZ2627 having at least 75%, at least 80%, at least 85%, at least 86%, at least 87%, at least 88%, at least 89%, at least 90%, at least 91%, at least 92%, at least 93%, at least 94%, at least 95%, at least 96%, at least 97%, at least 98%, at least 99%, or 100% sequence identity to SEQ ID NO: 43;

[0928] kk. a polypeptide from Aspergillus japonicus having at least 75%, at least 80%, at least 85%, at least 86%, at least 87%, at least 88%, at least 89%, at least 90%, at least 91%, at least 92%, at least 93%, at least 94%, at least 95%, at least 96%, at least 97%, at least 98%, at least 99%, or 100% sequence identity to SEQ ID NO: 44;

[0929] ll. a polypeptide from Metarhizium sp. XZ2431having at least 75%, at least 80%, at least 85%, at least 86%, at least 87%, at least 88%, at least 89%, at least 90%, at least 91%, at least 92%, at least 93%, at least 94%, at least 95%, at least 96%, at least 97%, at least 98%, at least 99%, or 100% sequence identity to SEQ ID NO: 45;

[0930] mm. a polypeptide from Armillaria ostoyae having at least 75%, at least 80%, at least 85%, at least 86%, at least 87%, at least 88%, at least 89%, at least 90%, at least 91%, at least 92%, at least 93%, at least 94%, at least 95%, at least 96%, at least 97%, at least 98%, at least 99%, or 100% sequence identity to SEQ ID NO: 46;

[0931] nn. a polypeptide from Trichoderma spirale having at least 75%, at least 80%, at least 85%, at least 86%, at least 87%, at least 88%, at least 89%, at least 90%, at least 91%, at least 92%, at least 93%, at least 94%, at least 95%, at least 96%, at least 97%, at least 98%, at least 99%, or 100% sequence identity to SEQ ID NO: 47; and

[0932] oo. a polypeptide from Aspergillus elegans having at least 75%, at least 80%, at least 85%, at least 86%, at least 87%, at least 88%, at least 89%, at least 90%, at least 91%, at least 92%, at least 93%, at least 94%, at least 95%, at least 96%, at least 97%, at least 98%, at least 99%, or 100% sequence identity to SEQ ID NO: 48;

[0933] pp. a polypeptide from Trichoderma sinuosum having at least 75%, at least 80%, at least 85%, at least 86%, at least 87%, at least 88%, at least 89%, at least 90%, at least 91%, at least 92%, at least 93%, at least 94%, at least 95%, at least 96%, at least 97%, at least 98%, at least 99%, or 100% sequence identity to SEQ ID NO:199;

[0934] qq. a polypeptide from Trichoderma virens having at least 75%, at least 80%, at least 85%, at least 86%, at least 87%, at least 88%, at least 89%, at least 90%, at least 91%, at least 92%, at least 93%, at least 94%, at least 95%, at least 96%, at least 97%, at least 98%, at least 99%, or 100% sequence identity to SEQ ID NO:200;

[0935] rr. a polypeptide from Trichoderma harzianum having at least 75%, at least 80%, at least 85%, at least 86%, at least 87%, at least 88%, at least 89%, at least 90%, at least 91%, at least 92%, at least 93%, at least 94%, at least 95%, at least 96%, at least 97%, at least 98%, at least 99%, or 100% sequence identity to SEQ ID NO 201;

[0936] ss. a polypeptide from Fusicolla acetilerea having at least 75%, at least 80%, at least 85%, at least 86%, at least 87%, at least 88%, at least 89%, at least 90%, at least 91%, at least 92%, at least 93%, at least 94%, at least 95%, at least 96%, at least 97%, at least 98%, at least 99%, or 100% sequence identity to SEQ ID NO:202;

[0937] tt. a polypeptide from Plectosphaerella sp. 1-29 having at least 75%, at least 80%, at least 85%, at least 86%, at least 87%, at least 88%, at least 89%, at least 90%, at least 91%, at least 92%, at least 93%, at least 94%, at least 95%, at least 96%, at least 97%, at least 98%, at least 99%, or 100% sequence identity to SEQ ID NO:203;

[0938] uu. a polypeptide Mariannaea punicea from having at least 75%, at least 80%, at least 85%, at least 86%, at least 87%, at least 88%, at least 89%, at least 90%, at least 91%, at least 92%, at least 93%, at least 94%, at least 95%, at least 96%, at least 97%, at least 98%, at least 99%, or 100% sequence identity to SEQ ID NO:204;

[0939] vv. a polypeptide from Penicillium oxalicum having at least 75%, at least 80%, at least 85%, at least 86%, at least 87%, at least 88%, at least 89%, at least 90%, at least 91%, at least 92%, at least 93%, at least 94%, at least 95%, at least 96%, at least 97%, at least 98%, at least 99%, or 100% sequence identity to SEQ ID NO: 205;

[0940] ww. a polypeptide from Colletotrichum sp-71086 having at least 75%, at least 80%, at least 85%, at least 86%, at least 87%, at least 88%, at least 89%, at least 90%, at least 91%, at least 92%, at least 93%, at least 94%, at least 95%, at least 96%, at least 97%, at least 98%, at least 99%, or 100% sequence identity to SEQ ID NO:206;

[0941] xx. a polypeptide from Aspergillus sp. nov. XZ3202 having at least 75%, at least 80%, at least 85%, at least 86%, at least 87%, at least 88%, at least 89%, at least 90%, at least 91%, at least 92%, at least 93%, at least 94%, at least 95%, at least 96%, at least 97%, at least 98%, at least 99%, or 100% sequence identity to SEQ ID NO:207;

[0942] yy. a polypeptide from Trichoderma parapiluliferum having at least 75%, at least 80%, at least 85%, at least 86%, at least 87%, at least 88%, at least 89%, at least 90%, at least 91%, at least 92%, at least 93%, at least 94%, at least 95%, at least 96%, at least 97%, at least 98%, at least 99%, or 100% sequence identity to SEQ ID NO:208;

[0943] zz. a polypeptide from Aspergillus sp. nov. XZ3202 having at least 75%, at least 80%, at least 85%, at least 86%, at least 87%, at least 88%, at least 89%, at least 90%, at least 91%, at least 92%, at least 93%, at least 94%, at least 95%, at least 96%, at least 97%, at least 98%, at least 99%, or 100% sequence identity to SEQ ID NO:209;

[0944] aaa. a polypeptide from Mucor sp. XZ2651having at least 75%, at least 80%, at least 85%, at least 86%, at least 87%, at least 88%, at least 89%, at least 90%, at least 91%, at least 92%, at least 93%, at least 94%, at least 95%, at least 96%, at least 97%, at least 98%, at least 99%, or 100% sequence identity to SEQ ID NO:232;

[0945] bbb. a polypeptide from Rhizomucor miehei having at least 75%, at least 80%, at least 85%, at least 86%, at least 87%, at least 88%, at least 89%, at least 90%, at least 91%, at least 92%, at least 93%, at least 94%, at least 95%, at least 96%, at least 97%, at least 98%, at least 99%, or 100% sequence identity to SEQ ID NO:233;

[0946] ccc. a polypeptide from Mucor sp. XZ2651 having at least 75%, at least 80%, at least 85%, at least 86%, at least 87%, at least 88%, at least 89%, at least 90%, at least 91%, at least 92%, at least 93%, at least 94%, at least 95%, at least 96%, at least 97%, at least 98%, at least 99%, or 100% sequence identity to SEQ ID NO:234;

[0947] ddd. a polypeptide from Amphisphaeriaceae -sp 43674 having at least 75%, at least 80%, at least 85%, at least 86%, at least 87%, at least 88%, at least 89%, at least 90%, at least 91%, at least 92%, at least 93%, at least 94%, at least 95%, at least 96%, at least 97%, at least 98%, at least 99%, or 100% sequence identity to SEQ ID NO:235;

[0948] eee. a polypeptide from Humicola fuscoatra having at least 75%, at least 80%, at least 85%, at least 86%, at least 87%, at least 88%, at least 89%, at least 90%, at least 91%, at least 92%, at least 93%, at least 94%, at least 95%, at least 96%, at least 97%, at least 98%, at least 99%, or 100% sequence identity to SEQ ID NO:236; and

[0949] fff. a polypeptide from Valsaria rubricosa having at least 75%, at least 80%, at least 85%, at least 86%, at least 87%, at least 88%, at least 89%, at least 90%, at least 91%, at least 92%, at least 93%, at least 94%, at least 95%, at least 96%, at least 97%, at least 98%, at least 99%, or 100% sequence identity to SEQ ID NO:237.

[0950] The polypeptide having superoxide dismutase activity may be selected from the group consisting
[0951] a. a polypeptide from Trichoderma reesei having at least 75%, at least 80%, at least 85%, at least 86%, at least 87%, at least 88%, at least 89%, at least 90%, at least 91%, at least 92%, at least 93%, at least 94%, at least 95%, at least 96%, at least 97%, at least 98%, at least 99%, or 100% sequence identity to SEQ ID NO 83;
[0952] b. a polypeptide from Aspergillus versicolor having at least 75%, at least 80%, at least 85%, at least 86%, at least 87%, at least 88%, at least 89%, at least 90%, at least 91%, at least 92%, at least 93%, at least 94%, at least 95%, at least 96%, at least 97%, at least 98%, at least 99%, or 100% sequence identity to SEQ ID NO 84;
[0953] c. a polypeptide from Aspergillus deflectus having at least 75%, at least 80%, at least 85%, at least 86%, at least 87%, at least 88%, at least 89%, at least 90%, at least 91%, at least 92%, at least 93%, at least 94%, at least 95%, at least 96%, at least 97%, at least 98%, at least 99%, or 100% sequence identity to SEQ ID NO 85;
[0954] d. a polypeptide from Aspergillus egyptiacus having at least 75%, at least 80%, at least 85%, at least 86%, at least 87%, at least 88%, at least 89%, at least 90%, at least 91%, at least 92%, at least 93%, at least 94%, at least 95%, at least 96%, at least 97%, at least 98%, at least 99%, or 100% sequence identity to SEQ ID NO 86;
[0955] e. a polypeptide from Westerdykella sp. AS85-2 having at least 75%, at least 80%, at least 85%, at least 86%, at least 87%, at least 88%, at least 89%, at least 90%, at least 91%, at least 92%, at least 93%, at least 94%, at least 95%, at least 96%, at least 97%, at least 98%, at least 99%, or 100% sequence identity to SEQ ID NO 49;
[0956] f. a polypeptide from Aspergillus sp. XZ2669 having at least 75%, at least 80%, at least 85%, at least 86%, at least 87%, at least 88%, at least 89%, at least 90%, at least 91%, at least 92%, at least 93%, at least 94%, at least 95%, at least 96%, at least 97%, at least 98%, at least 99%, or 100% sequence identity to SEQ ID NO 50;
[0957] g. a polypeptide from Preussia terricola having at least 75%, at least 80%, at least 85%, at least 86%, at least 87%, at least 88%, at least 89%, at least 90%, at least 91%, at least 92%, at least 93%, at least 94%, at least 95%, at least 96%, at least 97%, at least 98%, at least 99%, or 100% sequence identity to SEQ ID NO 51;
[0958] h. a polypeptide from Kioochaeta sp. having at least 75%, at least 80%, at least 85%, at least 86%, at least 87%, at least 88%, at least 89%, at least 90%, at least 91%, at least 92%, at least 93%, at least 94%, at least 95%, at least 96%, at least 97%, at least 98%, at least 99%, or 100% sequence identity to SEQ ID NO 52;
[0959] i. a polypeptide from Kioochaeta sp.having at least 75%, at least 80%, at least 85%, at least 86%, at least 87%, at least 88%, at least 89%, at least 90%, at least 91%, at least 92%, at least 93%, at least 94%, at least 95%, at least 96%, at least 97%, at least 98%, at least 99%, or 100% sequence identity to SEQ ID NO 53;
[0960] j. a polypeptide from Metapochonia bulbillosa having at least 75%, at least 80%, at least 85%, at least 86%, at least 87%, at least 88%, at least 89%, at least 90%, at least 91%, at least 92%, at least 93%, at least 94%, at least 95%, at least 96%, at least 97%, at least 98%, at least 99%, or 100% sequence identity to SEQ ID NO 54;
[0961] k. a polypeptide from Xylomelasma sp. XZ0718 having at least 75%, at least 80%, at least 85%, at least 86%, at least 87%, at least 88%, at least 89%, at least 90%, at least 91%, at least 92%, at least 93%, at least 94%, at least 95%, at least 96%, at least 97%, at least 98%, at least 99%, or 100% sequence identity to SEQ ID NO 55;
[0962] l. a polypeptide from Preussia flanaganii having at least 75%, at least 80%, at least 85%, at least 86%, at least 87%, at least 88%, at least 89%, at least 90%, at least 91%, at least 92%, at least 93%, at least 94%, at least 95%, at least 96%, at least 97%, at least 98%, at least 99%, or 100% sequence identity to SEQ ID NO 56;
[0963] m. a polypeptide from Cladobotryum sp having at least 75%, at least 80%, at least 85%, at least 86%, at least 87%, at least 88%, at least 89%, at least 90%, at least 91%, at least 92%, at least 93%, at least 94%, at least 95%, at least 96%, at least 97%, at least 98%, at least 99%, or 100% sequence identity to SEQ ID NO 18;
[0964] n. a polypeptide from Westerdykella sp-46156 having at least 75%, at least 80%, at least 85%, at least 86%, at least 87%, at least 88%, at least 89%, at least 90%, at least 91%, at least 92%, at least 93%, at least 94%, at least 95%, at least 96%, at least 97%, at least 98%, at least 99%, or 100% sequence identity to SEQ ID NO 57;
[0965] o. a polypeptide from Trichoderma hamatum having at least 75%, at least 80%, at least 85%, at least 86%, at least 87%, at least 88%, at least 89%, at least 90%, at least 91%, at least 92%, at least 93%, at least 94%, at least 95%, at least 96%, at least 97%, at least 98%, at least 99%, or 100% sequence identity to SEQ ID NO 58;
[0966] p. a polypeptide from Mycothermus thermophilus having at least 75%, at least 80%, at least 85%, at least 86%, at least 87%, at least 88%, at least 89%, at least 90%, at least 91%, at least 92%, at least 93%, at least 94%, at least 95%, at least 96%, at least 97%, at least 98%, at least 99%, or 100% sequence identity to SEQ ID NO 59,
[0967] q. a polypeptide from Cephalotrichiella penicillata having at least 75%, at least 80%, at least 85%, at least 86%, at least 87%, at least 88%, at least 89%, at least 90%, at least 91%, at least 92%, at least 93%, at least 94%, at least 95%, at least 96%, at least 97%, at least 98%, at least 99%, or 100% sequence identity to SEQ ID NO 60,
[0968] r. a polypeptide from Chaetomium megalocarpum having at least 75%, at least 80%, at least 85%, at least 86%, at least 87%, at least 88%, at least 89%, at least 90%, at least 91%, at least 92%, at least 93%, at least 94%, at least 95%, at least 96%, at least 97%, at least 98%, at least 99%, or 100% sequence identity to SEQ ID NO 61;
[0969] s. a polypeptide from Chaetomium thermophilum var. thermophilum having at least 75%, at least 80%, at least 85%, at least 86%, at least 87%, at least 88%, at least 89%, at least 90%, at least 91%, at least 92%, at least 93%, at least 94%, at least 95%, at least 96%, at least 97%, at least 98%, at least 99%, or 100% sequence identity to SEQ ID NO 62;
[0970] t. a polypeptide from Humicola hyalothermophila having at least 75%, at least 80%, at least 85%, at least 86%, at least 87%, at least 88%, at least 89%, at least 90%, at least 91%, at least 92%, at least 93%, at least 94%, at least 95%, at least 96%, at least 97%, at least 98%, at least 99%, or 100% sequence identity to SEQ ID NO 63;
[0971] u. a polypeptide from Subramaniula anamorphosa having at least 75%, at least 80%, at least 85%, at least 86%, at least 87%, at least 88%, at least 89%, at least 90%, at least 91%, at least 92%, at least 93%, at least 94%, at least 95%, at least 96%, at least 97%, at least 98%, at least 99%, or 100% sequence identity to SEQ ID NO 64;
[0972] v. a polypeptide from Sphingobacterium sp. T2 having at least 75%, at least 80%, at least 85%, at least 86%, at least 87%, at least 88%, at least 89%, at least 90%, at least 91%, at least 92%, at least 93%, at least 94%, at least 95%, at least 96%, at least 97%, at least 98%, at least 99%, or 100% sequence identity to SEQ ID NO 65;
[0973] w. a polypeptide from Trichoderma rossicum having at least 75%, at least 80%, at least 85%, at least 86%, at least 87%, at least 88%, at least 89%, at least 90%, at least 91%, at least 92%, at least 93%, at least 94%, at least 95%, at least 96%, at least 97%, at least 98%, at least 99%, or 100% sequence identity to SEQ ID NO 66;
[0974] x. a polypeptide from Trichoderma lixii having at least 75%, at least 80%, at least 85%, at least 86%, at least 87%, at least 88%, at least 89%, at least 90%, at least 91%, at least 92%, at least 93%, at least 94%, at least 95%, at least 96%, at least 97%, at least 98%, at least 99%, or 100% sequence identity to SEQ ID NO 67;
[0975] y. a polypeptide from Trichoderma sp-54723 having at least 75%, at least 80%, at least 85%, at least 86%, at least 87%, at least 88%, at least 89%, at least 90%, at least 91%, at least 92%, at least 93%, at least 94%, at least 95%, at least 96%, at least 97%, at least 98%, at least 99%, or 100% sequence identity to SEQ ID NO 68;
[0976] z. a polypeptide from Aspergillus niveus having at least 75%, at least 80%, at least 85%, at least 86%, at least 87%, at least 88%, at least 89%, at least 90%, at least 91%, at least 92%, at least 93%, at least 94%, at least 95%, at least 96%, at least 97%, at least 98%, at least 99%, or 100% sequence identity to SEQ ID NO 69;
[0977] aa. a polypeptide from Aspergillus templicola having at least 75%, at least 80%, at least 85%, at least 86%, at least 87%, at least 88%, at least 89%, at least 90%, at least 91%, at least 92%, at least 93%, at least 94%, at least 95%, at least 96%, at least 97%, at least 98%, at least 99%, or 100% sequence identity to SEQ ID NO 70;
[0978] bb. a polypeptide from Pochonia chlamydosporia var. spinulospora having at least 75%, at least 80%, at least 85%, at least 86%, at least 87%, at least 88%, at least 89%, at least 90%, at least 91%, at least 92%, at least 93%, at least 94%, at least 95%, at least 96%, at least 97%, at least 98%, at least 99%, or 100% sequence identity to SEQ ID NO 71;
[0979] cc. a polypeptide from Trichoderma sp-44174 having at least 75%, at least 80%, at least 85%, at least 86%, at least 87%, at least 88%, at least 89%, at least 90%, at least 91%, at least 92%, at least 93%, at least 94%, at least 95%, at least 96%, at least 97%, at least 98%, at least 99%, or 100% sequence identity to SEQ ID NO 35;
[0980] dd. a polypeptide from Trichoderma rossicum having at least 75%, at least 80%, at least 85%, at least 86%, at least 87%, at least 88%, at least 89%, at least 90%, at least 91%, at least 92%, at least 93%, at least 94%, at least 95%, at least 96%, at least 97%, at least 98%, at least 99%, or 100% sequence identity to SEQ ID NO 37;
[0981] ee. a polypeptide from Trichoderma sp-54723having at least 75%, at least 80%, at least 85%, at least 86%, at least 87%, at least 88%, at least 89%, at least 90%, at least 91%, at least 92%, at least 93%, at least 94%, at least 95%, at least 96%, at least 97%, at least 98%, at least 99%, or 100% sequence identity to SEQ ID NO 72;
[0982] ff. a polypeptide from Trichoderma sp-44174 having at least 75%, at least 80%, at least 85%, at least 86%, at least 87%, at least 88%, at least 89%, at least 90%, at least 91%, at least 92%, at least 93%, at least 94%, at least 95%, at least 96%, at least 97%, at least 98%, at least 99%, or 100% sequence identity to SEQ ID NO 73;
[0983] gg. a polypeptide from Metapochonia suchlasporia having at least 75%, at least 80%, at least 85%, at least 86%, at least 87%, at least 88%, at least 89%, at least 90%, at least 91%, at least 92%, at least 93%, at least 94%, at least 95%, at least 96%, at least 97%, at least 98%, at least 99%, or 100% sequence identity to SEQ ID NO 74;
[0984] hh. a polypeptide from Metarhizium marquandii having at least 75%, at least 80%, at least 85%, at least 86%, at least 87%, at least 88%, at least 89%, at least 90%, at least 91%, at least 92%, at least 93%, at least 94%, at least 95%, at least 96%, at least 97%, at least 98%, at least 99%, or 100% sequence identity to SEQ ID NO 75;
[0985] ii. a polypeptide from Diaporthe nobilis having at least 75%, at least 80%, at least 85%, at least 86%, at least 87%, at least 88%, at least 89%, at least 90%, at least 91%, at least 92%, at least 93%, at least 94%, at least 95%, at least 96%, at least 97%, at least 98%, at least 99%, or 100% sequence identity to SEQ ID NO 76;
[0986] jj. a polypeptide from Tolypocladium sp. XZ2627 having at least 75%, at least 80%, at least 85%, at least 86%, at least 87%, at least 88%, at least 89%, at least 90%, at least 91%, at least 92%, at least 93%, at least 94%, at least 95%, at least 96%, at least 97%, at least 98%, at least 99%, or 100% sequence identity to SEQ ID NO 77;
[0987] kk. a polypeptide from Aspergillus japonicus having at least 75%, at least 80%, at least 85%, at least 86%, at least 87%, at least 88%, at least 89%, at least 90%, at least 91%, at least 92%, at least 93%, at least 94%, at least 95%, at least 96%, at least 97%, at least 98%, at least 99%, or 100% sequence identity to SEQ ID NO 78;
[0988] ll. a polypeptide from Metarhizium sp. XZ2431 having at least 75%, at least 80%, at least 85%, at least 86%, at least 87%, at least 88%, at least 89%, at least 90%, at least 91%, at least 92%, at least 93%, at least 94%, at least 95%, at least 96%, at least 97%, at least 98%, at least 99%, or 100% sequence identity to SEQ ID NO 79;
[0989] mm. a polypeptide from Armillaria ostoyae having at least 75%, at least 80%, at least 85%, at least 86%, at least 87%, at least 88%, at least 89%, at least 90%, at least 91%, at least 92%, at least 93%, at least 94%, at least 95%, at least 96%, at least 97%, at least 98%, at least 99%, or 100% sequence identity to SEQ ID NO 80;
[0990] nn. a polypeptide from Trichoderma spirale having at least 75%, at least 80%, at least 85%, at least 86%, at least 87%, at least 88%, at least 89%, at least 90%, at least 91%, at least 92%, at least 93%, at least 94%, at least 95%, at least 96%, at least 97%, at least 98%, at least 99%, or 100% sequence identity to SEQ ID NO 81;
[0991] oo. a polypeptide from Aspergillus elegans having at least 75%, at least 80%, at least 85%, at least 86%, at least 87%, at least 88%, at least 89%, at least 90%, at least 91%, at least 92%, at least 93%, at least 94%, at least 95%, at least 96%, at least 97%, at least 98%, at least 99%, or 100% sequence identity to SEQ ID NO 82;
[0992] pp. a polypeptide from Trichoderma sinuosum having at least 75%, at least 80%, at least 85%, at least 86%, at least 87%, at least 88%, at least 89%, at least 90%, at least 91%, at least 92%, at least 93%, at least 94%, at least 95%, at least 96%, at least 97%, at least 98%, at least 99%, or 100% sequence identity to SEQ ID NO 210;
[0993] qq. a polypeptide from Trichoderma virens having at least 75%, at least 80%, at least 85%, at least 86%, at least 87%, at least 88%, at least 89%, at least 90%, at least 91%, at least 92%, at least 93%, at least 94%, at least 95%, at least 96%, at least 97%, at least 98%, at least 99%, or 100% sequence identity to SEQ ID NO 211;
[0994] rr. a polypeptide from Trichoderma harzianum having at least 75%, at least 80%, at least 85%, at least 86%, at least 87%, at least 88%, at least 89%, at least 90%, at least 91%, at least 92%, at least 93%, at least 94%, at least 95%, at least 96%, at least 97%, at least 98%, at least 99%, or 100% sequence identity to SEQ ID NO 212;
[0995] ss. a polypeptide from Fusicolla acetilerea having at least 75%, at least 80%, at least 85%, at least 86%, at least 87%, at least 88%, at least 89%, at least 90%, at least 91%, at least 92%, at least 93%, at least 94%, at least 95%, at least 96%, at least 97%, at least 98%, at least 99%, or 100% sequence identity to SEQ ID NO 213;
[0996] tt. a polypeptide from Plectosphaerella sp. 1-29 having at least 75%, at least 80%, at least 85%, at least 86%, at least 87%, at least 88%, at least 89%, at least 90%, at least 91%, at least 92%, at least 93%, at least 94%, at least 95%, at least 96%, at least 97%, at least 98%, at least 99%, or 100% sequence identity to SEQ ID NO 214;
[0997] uu. a polypeptide from Mariannaea punicea having at least 75%, at least 80%, at least 85%, at least 86%, at least 87%, at least 88%, at least 89%, at least 90%, at least 91%, at least 92%, at least 93%, at least 94%, at least 95%, at least 96%, at least 97%, at least 98%, at least 99%, or 100% sequence identity to SEQ ID NO 215;
[0998] vv. a polypeptide from Penicillium oxalicum having at least 75%, at least 80%, at least 85%, at least 86%, at least 87%, at least 88%, at least 89%, at least 90%, at least 91%, at least 92%, at least 93%, at least 94%, at least 95%, at least 96%, at least 97%, at least 98%, at least 99%, or 100% sequence identity to SEQ ID NO 216;
[0999] ww. a polypeptide from Colletotrichum sp-71086 having at least 75%, at least 80%, at least 85%, at least 86%, at least 87%, at least 88%, at least 89%, at least 90%, at least 91%, at least 92%, at least 93%, at least 94%, at least 95%, at least 96%, at least 97%, at least 98%, at least 99%, or 100% sequence identity to SEQ ID NO 217;
[1000] xx. a polypeptide from Aspergillus sp. nov. XZ3202 having at least 75%, at least 80%, at least 85%, at least 86%, at least 87%, at least 88%, at least 89%, at least 90%, at least 91%, at least 92%, at least 93%, at least 94%, at least 95%, at least 96%, at least 97%, at least 98%, at least 99%, or 100% sequence identity to SEQ ID NO 218;
[1001] yy. a polypeptide from Trichoderma parapiluliferum having at least 75%, at least 80%, at least 85%, at least 86%, at least 87%, at least 88%, at least 89%, at least 90%, at least 91%, at least 92%, at least 93%, at least 94%, at least 95%, at least 96%, at least 97%, at least 98%, at least 99%, or 100% sequence identity to SEQ ID NO 219;
[1002] zz. a polypeptide from Aspergillus sp. nov. XZ3202 having at least 75%, at least 80%, at least 85%, at least 86%, at least 87%, at least 88%, at least 89%, at least 90%, at least 91%, at least 92%, at least 93%, at least 94%, at least 95%, at least 96%, at least 97%, at least 98%, at least 99%, or 100% sequence identity to SEQ ID NO 220;
[1003] aaa. a polypeptide from Mucor sp. XZ2651 having at least 75%, at least 80%, at least 85%, at least 86%, at least 87%, at least 88%, at least 89%, at least 90%, at least 91%, at least 92%, at least 93%, at least 94%, at least 95%, at least 96%, at least 97%, at least 98%, at least 99%, or 100% sequence identity to SEQ ID NO 238;
[1004] bbb. a polypeptide from Rhizomucor miehei having at least 75%, at least 80%, at least 85%, at least 86%, at least 87%, at least 88%, at least 89%, at least 90%, at least 91%, at least 92%, at least 93%, at least 94%, at least 95%, at least 96%, at least 97%, at least 98%, at least 99%, or 100% sequence identity to SEQ ID NO 239;
[1005] ccc. a polypeptide from Mucor sp. XZ2651 having at least 75%, at least 80%, at least 85%, at least 86%, at least 87%, at least 88%, at least 89%, at least 90%, at least 91%, at least 92%, at least 93%, at least 94%, at least 95%, at least 96%, at least 97%, at least 98%, at least 99%, or 100% sequence identity to SEQ ID NO 240;
[1006] ddd. a polypeptide from Amphisphaeriaceae -sp 43674having at least 75%, at least 80%, at least 85%, at least 86%, at least 87%, at least 88%, at least 89%, at least 90%, at least 91%, at least 92%, at least 93%, at least 94%, at least 95%, at least 96%, at least 97%, at least 98%, at least 99%, or 100% sequence identity to SEQ ID NO 241;
[1007] eee. a polypeptide from Humicola fuscoatra having at least 75%, at least 80%, at least 85%, at least 86%, at least 87%, at least 88%, at least 89%, at least 90%, at least 91%, at least 92%, at least 93%, at least 94%, at least 95%, at least 96%, at least 97%, at least 98%, at least 99%, or 100% sequence identity to SEQ ID NO 242; and
[1008] fff. a polypeptide from Valsaria rubricosa having at least 75%, at least 80%, at least 85%, at least 86%, at least 87%, at least 88%, at least 89%, at least 90%, at least 91%, at least 92%, at least 93%, at least 94%, at least 95%, at least 96%, at least 97%, at least 98%, at least 99%, or 100% sequence identity to SEQ ID NO 243.

### Metals of Superoxide Dismutases

[1009] In an embodiment of the invention the polypeptide having superoxide dismutase activity is of fungal origin and is selected selected from the group consisting of a Cu-SOD, a Zn-SOD, a Cu/Zn-SOD, a Mn-SOD, and an Fe-SOD, more typically a Cu-SOD, a Zn-SOD, a Cu/Zn-SOD, a Mn-SOD, and an Fe-SOD, even more typically a Cu-SOD, a Zn-SOD, a Cu/Zn-SOD, or a Mn-SOD.

[1010] In a suitable embodiment of the invention the polypeptide having superoxide dismutase activity is of fungal origin and is selected from the group consisting of a Cu-SOD and a Cu/Zn-SOD.

[1011] The copper ion is involved in the catalysis of Cu-SODs whereas the zinc ion plays a structural role. The redox active copper catalyzes the disproportionation of superoxide anion to oxygen and hydrogen peroxide, whereas the zinc helps stabilize the protein and promotes pH independence of the reaction.

Table of Metals

| | SEQ ID NO | SEQ ID NO | SEQ ID NO | |
|---|---|---|---|---|
| | Mature | Full | | |
| Source | peptide | polypeptide | DNA | Metal |
| Trichoderma | SED ID | SEQ ID NO 83 | SEQ ID NO 5 | Cu |
| reesei | NO 1 | | | |
| Aspergillus | SED ID | SEQ ID NO 84 | SEQ ID NO 87 | Cu |
| versicolor | NO 2 | | | |
| Aspergillus | SEQ ID | SEQ ID NO 85 | SEQ ID NO 88 | Cu/Zn |
| deflectus | NO 3 | | | |
| Aspergillus | SEQ ID | SEQ ID NO 86 | SEQ ID NO 89 | Cu |
| egyptiacus | NO 4 | | | |
| Westerdykella | SEQ ID | SEQ ID NO 49 | SEQ ID NO 90 | Fe |
| sp. A585-2 | NO 9 | | | |
| Aspergillus | SEQ ID | SEQ ID NO 50 | SEQ ID NO 91 | Cu |
| sp. XZ2669 | NO 10 | | | |
| Preussia terricola | SEQ ID | SEQ ID NO 51 | SEQ ID NO 92 | Fe |
| | NO 11 | | | |
| Kionochaeta sp. | SEQ ID | SEQ ID NO 52 | SEQ ID NO 93 | Cu/Zn |
| | NO 12 | | | |
| Kionochaeta sp. | SEQ ID | SEQ ID NO 53 | SEQ ID NO 94 | Cu/Zn |
| | NO 13 | | | |
| Metapochonia | SEQ ID | SEQ ID NO 54 | SEQ ID NO 95 | Cu |
| bulbillosa | NO 14 | | | |
| Xylomelasma | SEQ ID | SEQ ID NO 55 | SEQ ID NO 96 | Cu |
| sp. XZ0718 | NO 15 | | | |
| Preussia flanaganii | SEQ ID | SEQ ID NO 56 | SEQ ID NO 97 | Fe |
| | NO 16 | | | |
| Cladobotryum sp. | SEQ ID | SEQ ID NO 18 | SEQ ID NO 98 | Fe |
| | NO 17 | | | |
| Westerdykella | SEQ ID | SEQ ID NO 57 | SEQ ID NO 99 | Fe |
| sp-46156 | NO 19 | | | |
| Trichoderma | SEQ ID | SEQ ID NO 58 | SEQ ID NO 100 | Fe |
| hamatum | NO 20 | | | |
| Mycothermus | SEQ ID | SEQ ID NO 59 | SEQ ID NO 101 | Cu/Zn |
| thermophilus | NO 21 | | | |
| Cephalotrichiella | SEQ ID | SEQ ID NO 60 | SEQ ID NO 102 | Fe |
| penicillata | NO 22 | | | |
| Chaetomiurn | SEQ ID | SEQ ID NO 61 | SEQ ID NO 127 | Fe |
| megalocarpum | NO 23 | | | |
| Chaetomiurn | SEQ ID | SEQ ID NO 62 | SEQ ID NO 128 | Fe |
| thermophilum var. | NO 24 | | | |
| thermophilum | | | | |
| Humicola | SEQ ID | SEQ ID NO 63 | SEQ ID NO 129 | Fe |
| hyalothermophila | NO 25 | | | |
| Subramaniula | SEQ ID | SEQ ID NO 64 | SEQ ID NO 130 | Fe |
| anamorphosa | NO 26 | | | |
| Sphingobacterium | SEQ ID | SEQ ID N065 | SEQ ID NO 131 | Fe |
| sp. T2 | NO 27 | | | |
| Trichoderma | SEQ ID | SEQ ID NO 66 | SEQ ID NO 132 | Cu |
| rossicum | NO 28 | | | |
| Trichoderma lixii | SEQ ID | SEQ ID NO 67 | SEQ ID NO 133 | Cu |
| | NO 29 | | | |
| Trichoderma | SEQ ID | SEQ ID NO 68 | SEQ ID NO 134 | Cu |
| sp-54723 | NO 30 | | | |
| Aspergillus niveus | SEQ ID | SEQ ID NO 69 | SEQ ID NO 135 | Cu |
| | NO 31 | | | |
| Aspergillus | SEQ ID | SEQ ID NO 70 | SEQ ID NO 136 | Cu |
| templicola | NO 32 | | | |
| Pochonia | SEQ ID | SEQ ID NO 71 | SEQ ID NO 137 | Cu |
| chlamydosporia | NO 33 | | | |
| var. spinulospora | | | | |
| Trichoderma | SEQ ID | SEQ ID NO 35 | SEQ ID NO 138 | Cu |
| sp-44174 | NO 34 | | | |
| Trichoderma | SEQ ID | SEQ ID NO 37 | SEQ ID NO 139 | Cu |
| rossicum | NO 36 | | | |
| Trichoderma | SEQ ID | SEQ ID NO 72 | SEQ ID NO 140 | Cu |
| sp-54723 | NO 38 | | | |
| Trichoderma | SEQ ID | SEQ ID NO 73 | SEQ ID NO 141 | Cu |
| sp-44174 | NO 39 | | | |
| Metapochonia | SEQ ID | SEQ ID NO 74 | SEQ ID NO 142 | Cu |
| suchlasporia | NO 40 | | | |
| Metarhizium | SEQ ID | SEQ ID NO 75 | SEQ ID NO 143 | Cu |
| marquandii | NO 41 | | | |
| Diaporthe nobilis | SEQ ID | SEQ ID NO 76 | SEQ ID NO 144 | Cu |
| | NO 42 | | | |
| Tolypocladium | SEQ ID | SEQ ID NO 77 | SEQ ID NO 145 | Cu/Zn |
| sp. XZ2627 | NO 43 | | | |
| Aspergillus | SEQ ID | SEQ ID NO 78 | SEQ ID NO 146 | Cu |
| japonicus | NO 44 | | | |
| Metarhizium | SEQ ID | SEQ ID NO 79 | SEQ ID NO 147 | Cu |
| sp. XZ2431 | NO 45 | | | |
| Armillaria ostoyae | SEQ ID | SEQ ID NO 80 | SEQ ID NO 148 | Cu/Zn |
| | NO 46 | | | |
| Trichoderma | SEQ ID | SEQ ID NO 81 | SEQ ID NO 149 | Cu |
| spirale | NO 47 | | | |
| Aspergillus | SEQ ID | SEQ ID NO 82 | SEQ ID NO 150 | Cu/Zn |
| elegans | NO 48 | | | |
| Trichoderma | SEQ ID | SEQ ID NO 210 | SEQ ID NO 221 | Cu |
| sinuosum | NO 199 | | | |
| Trichoderma | SEQ ID | SEQ ID NO 211 | SEQ ID NO 222 | Cu/Zn |
| virens | NO 200 | | | |
| Trichoderma | SEQ ID | SEQ ID NO 212 | SEQ ID NO 223 | Cu |
| harzianum | NO 201 | | | |
| Fusicolla | SEQ ID | SEQ ID NO 213 | SEQ ID NO 224 | Cu/Zn |
| acetilerea | NO 202 | | | |
| Plectosphaerella | SEQ ID | SEQ ID NO 214 | SEQ ID NO 225 | Cu/Zn |
| sp. 1-29 | NO 203 | | | |
| Mariannaea | SEQ ID | SEQ ID NO 215 | SEQ ID NO 226 | Cu/Zn |
| punicea | NO 204 | | | |
| Penicillium | SEQ ID | SEQ ID NO 216 | SEQ ID NO 227 | Cu/Zn |
| oxalicum | NO 205 | | | |
| Colletotrichum | SEQ ID | SEQ ID NO 217 | SEQ ID NO 228 | Cu |
| sp-71086 | NO 206 | | | |
| Aspergillus sp. | SEQ ID | SEQ ID NO 218 | SEQ ID NO 229 | Cu/Zn |
| nov. XZ3202 | NO 207 | | | |
| Trichoderma | SEQ ID | SEQ ID NO 219 | SEQ ID NO 230 | Cu |
| parapiluliferum | NO 208 | | | |
| Aspergillus sp. | SEQ ID | SEQ ID NO 220 | SEQ ID NO 231 | Cu |
| nov. XZ3202 | NO 209 | | | |
| Mucor | SEQ ID | SEQ ID NO 238 | SEQ ID NO 244 | Cu |
| sp. XZ2651 | NO 232 | | | |
| Rhizomucor | SEQ ID | SEQ ID NO 239 | SEQ ID NO 245 | Cu |
| miehei | NO 233 | | | |
| Mucor | SEQ ID | SEQ ID NO 240 | SEQ ID NO 246 | Cu |
| sp. XZ2651 | NO 234 | | | |
| Amphisphaeriaceae | SEQ ID | SEQ ID NO 241 | SEQ ID NO 247 | Cu |
| sp-43674 | NO 235 | | | |
| Humicola fuscoatra | SEQ ID | SEQ ID NO 242 | SEQ ID NO 248 | Cu/Zn |
| | NO 236 | | | |
| Valsaria rubricosa | SEQ ID | SEQ ID NO 243 | SEQ ID NO 249 | Cu |
| | NO 237 | | | |

### Catalytic Site of Superoxide Dismutases

[1012] In an embodiment of the invention, the polypeptide having superoxide dismutase activity has a conserved catalytic site selected from the group consisting of H69,H71,H86,H150; H66,H68,H84,H148; H66,H68,H84,H148; H68,H70,H85,H149; H69,H71,H86,H150: H68,H70,H86,H150; H62,H64,H80,H144; H44,H46,H61,H118; H79,H81,H97,H161: H82,H84,H100,H164; H65,H67,H83,H150; H45,H47,H62,H119; H67,H69,H85,H149; H50,H52,H67,H126; H67,H69,H85,H149; H63,H65,H81,H148; H67,H69,H85,H149; H62,H64,H80,H147; H62,H64,H80,H147; H68,H70,H85,H149; H69,H71,H86,H150; H75,H77,H93,H156; H61,H63,H79,H146; H68,H70,H85,H149.

[1013] In a suitable embodiment, the SOD of the invention is a polypeptide having super oxide dismutase activity is selected from the group consisting of
[1014] i. a polypeptide which has at least 75%, at least 80%, at least 85%, at least 86%, at least 87%, at least 88%, at least 89%, at least 90%, at least 91%, at least 92%, at least 93%, at least 94%, at least 95%, at least 96%, at least 97%, at least 98%, at least 99%, or 100% sequence identity with the Cu-SOD of SEQ ID NO: 34, comprises amino acid residues H69,H71,H86,H150 at its catalytic site and suitably obtainable from Trichoderma sp-44174;
[1015] ii. a polypeptide which has a at least 75%, at least 80%, at least 85%, at least 86%, at least 87%, at least 88%, at least 89%, at least 90%, at least 91%, at least 92%, at least 93%, at least 94%, at least 95%, at least 96%, at least 97%, at least 98%, at least 99%, or 100% sequence identity with the Cu-SOD of SEQ ID NO: 39, comprises amino acid residues H69,H71,H86,H150 at its catalytic site and suitably obtainable from Trichoderma sp-44174;
[1016] iii. a polypeptide which invention has a at least 75%, at least 80%, at least 85%, at least 86%, at least 87%, at least 88%, at least 89%, at least 90%, at least 91%, at least 92%, at least 93%, at least 94%, at least 95%, at least 96%, at least 97%, at least 98%, at least 99%, or 100% sequence identity with the Cu-SOD of SEQ ID NO: 33, comprises amino acid residues H66,H68,H84,H148 at its catalytic site and suitably obtainable from Pochonia chlamydosporia var. spinulospora.
[1017] iv. a polypeptide which has a at least 75%, at least 80%, at least 85%, at least 86%, at least 87%, at least 88%, at least 89%, at least 90%, at least 91%, at least 92%, at least 93%, at least 94%, at least 95%, at least 96%, at least 97%, at least 98%, at least 99%, or 100% sequence identity with the Cu-SOD of SEQ ID NO: 37, comprises amino acid residues H68,H70,H85,H149 at its catalytic site and suitably obtainable from Trichoderma sp-54723;
[1018] v. a polypeptide which has a at least 75%, at least 80%, at least 85%, at least 86%, at least 87%, at least 88%, at least 89%, at least 90%, at least 91%, at least 92%, at least 93%, at least 94%, at least 95%, at least 96%, at least 97%, at least 98%, at least 99%, or 100% sequence identity with the Cu-SOD of SEQ ID NO: 28, comprises amino acid residues H69,H71,H86,H150 at its catalytic site and suitably obtainable from Trichoderma rossicum;
[1019] vi. a polypeptide which has a at least 75%, at least 80%, at least 85%, at least 86%, at least 87%, at least 88%, at least 89%, at least 90%, at least 91%, at least 92%, at least 93%, at least 94%, at least 95%, at least 96%, at least 97%, at least 98%, at least 99%, or 100% sequence identity with the Cu-SOD of SEQ ID NO: 45, comprises amino acid residues H68,H70,H86,H150at its catalytic site and suitably obtainable from Metarhizium sp. XZ2431;
[1020] vii. a polypeptide which has a at least 75%, at least 80%, at least 85%, at least 86%, at least 87%, at least 88%, at least 89%, at least 90%, at least 91%, at least 92%, at least 93%, at least 94%, at least 95%, at least 96%, at least 97%, at least 98%, at least 99%, or 100% sequence identity with the Cu-SOD of SEQ ID NO: 29, comprises amino acid residues H69,H71,H86,H150 at its catalytic site and suitably obtainable from Trichoderma lixii;
[1021] viii. a polypeptide which has a at least 75%, at least 80%, at least 85%, at least 86%, at least 87%, at least 88%, at least 89%, at least 90%, at least 91%, at least 92%, at least 93%, at least 94%, at least 95%, at least 96%, at least 97%, at least 98%, at least 99%, or 100% sequence identity with the Cu-SOD of SEQ ID NO: 12, comprises amino acid residues H69,H71,H86,H150 at its catalytic site and suitably obtainable from Kioochaeta sp;
[1022] ix. a polypeptide which has a at least 75%, at least 80%, at least 85%, at least 86%, at least 87%, at least 88%, at least 89%, at least 90%, at least 91%, at least 92%, at least 93%, at least 94%, at least 95%, at least 96%, at least 97%, at least 98%, at least 99%, or 100% sequence identity with the Cu-SOD of SEQ ID NO: 21, comprises amino acid residues H44,H46,H61,H118 at its catalytic site and suitably obtainable from Mycothermus thermophilus;
[1023] x. a polypeptide which has a at least 75%, at least 80%, at least 85%, at least 86%, at least 87%, at least 88%, at least 89%, at least 90%, at least 91%, at least 92%, at least 93%, at least 94%, at least 95%, at least 96%, at least 97%, at least 98%, at least 99%, or 100% sequence identity with the Cu-SOD of SEQ ID NO: 30, comprises amino acid residues H68,H70,H85,H149 at its catalytic site and suitably obtainable from Trichoderma sp-54723;
[1024] xi. a polypeptide which has a at least 75%, at least 80%, at least 85%, at least 86%, at least 87%, at least 88%, at least 89%, at least 90%, at least 91%, at least 92%, at least 93%, at least 94%, at least 95%, at least 96%, at least 97%, at least 98%, at least 99%, or 100% sequence identity with the Cu-SOD of SEQ ID NO: 13, comprises amino acid residues H79,H81,H97,H161 at its catalytic site and suitably obtainable from Kioochaeta sp;
[1025] xii. a polypeptide which has a at least 75%, at least 80%, at least 85%, at least 86%, at least 87%, at least 88%, at least 89%, at least 90%, at least 91%, at least 92%, at least 93%, at least 94%, at least 95%, at least 96%, at least 97%, at least 98%, at least 99%, or 100% sequence identity with the Cu-SOD of SEQ ID NO: 15, comprises amino acid residues H82,H84,H100,H164 at its catalytic site and suitably obtainable from Xylomelasma sp. XZ0718;
[1026] xiii. a polypeptide which has a at least 75%, at least 80%, at least 85%, at least 86%, at least 87%, at least 88%, at least 89%, at least 90%, at least 91%, at least 92%, at least 93%, at least 94%, at least 95%, at least 96%, at least 97%, at least 98%, at least 99%, or 100% sequence identity with the Cu-SOD of SEQ ID NO: 48, comprises amino acid residues H65,H67,H83,H150 at its catalytic site and suitably obtainable from Aspergillus elegans;
[1027] xiv. a polypeptide which has a at least 75%, at least 80%, at least 85%, at least 86%, at least 87%, at least 88%, at least 89%, at least 90%, at least 91%, at least 92%, at least 93%, at least 94%, at least 95%, at least 96%, at least 97%, at least 98%, at least 99%, or 100% sequence identity with the Cu-SOD of SEQ ID NO: 14, comprises amino acid residues H67,H69,H85,H149 at its catalytic site and suitably obtainable from Metapochonia bulbillosa;
[1028] xv. a polypeptide which has a at least 75%, at least 80%, at least 85%, at least 86%, at least 87%, at least 88%, at least 89%, at least 90%, at least 91%, at least 92%, at least 93%, at least 94%, at least 95%, at least 96%, at least 97%, at least 98%, at least 99%, or 100% sequence identity with the Cu-SOD of SEQ ID NO: 46, comprises amino acid residues H50,H52,H67,H126 at its catalytic site and suitably obtainable from Armillaria ostoyae;
[1029] xvi. a polypeptide which invention has a at least 75%, at least 80%, at least 85%, at least 86%, at least 87%, at least 88%, at least 89%, at least 90%, at least 91%, at least 92%, at least 93%, at least 94%, at least 95%, at least 96%, at least 97%, at least 98%, at least 99%, or 100% sequence identity with the Cu-SOD of SEQ ID NO: 40, comprises amino acid residues H67,H69,H85,H149 at its catalytic site and suitably obtainable from Metapochonia suchlasporia;
[1030] xvii. a polypeptide which as a at least 75%, at least 80%, at least 85%, at least 86%, at least 87%, at least 88%, at least 89%, at least 90%, at least 91%, at least 92%, at least 93%, at least 94%, at least 95%, at least 96%, at least 97%, at least 98%, at least 99%, or 100% sequence identity with the Cu-SOD of SEQ ID NO: 31, comprises amino acid residues H63,H65,H81,H148 at its catalytic site and suitably obtainable from Aspergillus niveus;
[1031] xviii. a polypeptide which has a at least 75%, at least 80%, at least 85%, at least 86%, at least 87%, at least 88%, at least 89%, at least 90%, at least 91%, at least 92%, at least 93%, at least 94%, at least 95%, at least 96%, at least 97%, at least 98%, at least 99%, or 100% sequence identity with the Cu-SOD of SEQ ID NO: 41, comprises amino acid residues H67,H69,H85,H149 at its catalytic site and suitably obtainable from Metarhizium marquandii;
[1032] xix. a polypeptide which has a at least 75%, at least 80%, at least 85%, at least 86%, at least 87%, at least 88%, at least 89%, at least 90%, at least 91%, at least 92%, at least 93%, at least 94%, at least 95%, at least 96%, at least 97%, at least 98%, at least 99%, or 100% sequence identity with the Cu-SOD of SEQ ID NO: 10, comprises amino acid residues H62,H64,H80,H147 at its catalytic site and suitably obtainable from Aspergillus sp. XZ2669;
[1033] xx. a polypeptide which has a at least 75%, at least 80%, at least 85%, at least 86%, at least 87%, at least 88%, at least 89%, at least 90%, at least 91%, at least 92%, at least 93%, at least 94%, at least 95%, at least 96%, at least 97%, at least 98%, at least 99%, or 100% sequence identity with the Cu-SOD of SEQ ID NO: 32, comprises amino acid residues H62,H64,H80,H147 at its catalytic site and suitably obtainable from Aspergillus templicola;
[1034] xxi. a polypeptide which has a at least 75%, at least 80%, at least 85%, at least 86%, at least 87%, at least 88%, at least 89%, at least 90%, at least 91%, at least 92%, at least 93%, at least 94%, at least 95%, at least 96%, at least 97%, at least 98%, at least 99%, or 100% sequence identity with the Cu-SOD of SEQ ID NO: 35, comprises amino acid residues H69,H71,H86,H150 at its catalytic site and suitably obtainable from Trichoderma rossicum;
[1035] xxii. a polypeptide which has a at least 75%, at least 80%, at least 85%, at least 86%, at least 87%, at least 88%, at least 89%, at least 90%, at least 91%, at least 92%, at least 93%, at least 94%, at least 95%, at least 96%, at least 97%, at least 98%, at least 99%, or 100% sequence identity with the Cu-SOD of SEQ ID NO: 42, comprises amino acid residues H75,H77,H93,H156 at its catalytic site and suitably obtainable from Diaporthe nobilis;
[1036] xxiii. a polypeptide which has a at least 75%, at least 80%, at least 85%, at least 86%, at least 87%, at least 88%, at least 89%, at least 90%, at least 91%, at least 92%, at least 93%, at least 94%, at least 95%, at least 96%, at least 97%, at least 98%, at least 99%, or 100% sequence identity with the Cu-SOD of SEQ ID NO: 44, comprises amino acid residues H61,H63,H79,H146 at its catalytic site and suitably obtainable from Aspergillus japonicus;
[1037] xxiv. a polypeptide which has a at least 75%, at least 80%, at least 85%, at least 86%, at least 87%, at least 88%, at least 89%, at least 90%, at least 91%, at least 92%, at least 93%, at least 94%, at least 95%, at least 96%, at least 97%, at least 98%, at least 99%, or 100% sequence identity with the Cu-SOD of SEQ ID NO: 43, comprises amino acid residues H68,H70,H85,H149 at its catalytic site and suitably obtainable from Tolypocladium sp. XZ2627; and
[1038] xxv. a polypeptide which has at least 75%, at least 80%, at least 85%, at least 86%, at least 87%, at least 88%, at least 89%, at least 90%, at least 91%, at least 92%, at least 93%, at least 94%, at least 95%, at least 96%, at least 97%, at least 98%, at least 99%, or 100% sequence identity with the Cu-SOD of SEQ ID NO: 47, comprises amino acid residues H69,H71,H86,H150 at its catalytic site and suitably obtainable from Trichoderma spirale.

### Activity of Superoxide Dismutases

[1039] In a preferred embodiment, the SOD of the invention has an activity level above 1000 U/mg EP when measured according to the method described in Example 9 at pH 7.8. Accordingly, in one embodiment of the invention the SOD is selected from a polypeptide which has at least 75%, at least 80%, at least 85%, at least 86%, at least 87%, at least 88%, at least 89%, at least 90%, at least 91%, at least 92%, at least 93%, at least 94%, at least 95%, at least 96%, at least 97%, at least 98%, at least 99%, or 100% sequence identity with a mature polypeptide selected from the group consisting of SEQ ID NO 1, SEQ ID NO 15, SEQ ID NO 21, SEQ ID NO 24, SEQ ID NO 28, SEQ ID NO 29, SEQ ID NO 30, SEQ ID NO 31, SEQ ID NO 32, SEQ ID NO 33, SEQ ID NO 34, SEQ ID NO 35, SEQ ID NO 39, SEQ ID NO 41, SEQ ID NO 42, SEQ ID NO 44, SEQ ID NO 45, SEQ ID NO 48, SEQ ID NO 202, SEQ ID NO 203, SEQ ID NO 204, SEQ ID NO 205, SEQ ID NO 206, SEQ ID NO 207, SEQ ID NO 208, SEQ ID NO 209, SEQ ID NO 232, SEQ ID NO 233, SEQ ID NO 234, SEQ ID NO 235, SEQ ID NO 236, SEQ ID NO 237 or with a full length polypeptide selected from the group consisting of SEQ ID NO 83, SEQ ID NO 50, SEQ ID NO 51, SEQ ID NO 52, SEQ ID NO 53, SEQ ID NO 54, SEQ ID NO 55, SEQ ID NO 56, SEQ ID NO 18, SEQ ID NO 57, SEQ ID NO 59, SEQ ID NO 60, SEQ ID NO 61, SEQ ID NO 62, SEQ ID NO 63, SEQ ID NO 64, SEQ ID NO 65, SEQ ID NO 66, SEQ ID NO 67, SEQ ID NO 68, SEQ ID NO 69, SEQ ID NO 70, SEQ ID NO 71, SEQ ID NO 35, SEQ ID NO 37, SEQ ID NO 72, SEQ ID NO 73,SEQ ID NO 74, SEQ ID NO 75, SEQ ID NO 76, SEQ ID NO 77, SEQ ID NO 78, SEQ ID NO 79, SEQ ID NO 80, SEQ ID NO 81, SEQ ID NO 82, SEQ ID NO 210, SEQ ID NO 211, SEQ ID NO 212, SEQ ID NO 213, SEQ ID NO 214, SEQ ID NO 215, SEQ ID NO 216, SEQ ID NO 217, SEQ ID NO 218, SEQ ID NO 219, SEQ ID NO 220, SEQ ID NO 238, SEQ ID NO 239, SEQ ID NO 240, SEQ ID NO 241, SEQ ID NO 242 and SEQ ID NO 243.

Activity Table

| | | | Relative |
|---|---|---|---|
| | Mature | Full | Activity |
| | polypeptide | polypeptide | Unit |
| Source | SEQ ID NO | SEQ ID NO | (U/mg EP) |
| Trichoderma reesei | SED ID NO 1 | SEQ ID NO 83 | 6055 |
| Westerdykella sp. A585-2 | SEQ ID NO 9 | SEQ ID NO 49 | 699 |
| Aspergillus sp. XZ2669 | SEQ ID NO 10 | SEQ ID NO 50 | 1000 |
| Preussia terricola | SEQ ID NO 11 | SEQ ID NO 51 | 634 |
| Kionochaeta sp. | SEQ ID NO 12 | SEQ ID NO 52 | 1184 |
| Kionochaeta sp. | SEQ ID NO 13 | SEQ ID NO 53 | 2108 |
| Metapochonia bulbillosa | SEQ ID NO 14 | SEQ ID NO 54 | 1494 |
| Xylomelasma sp. XZ0718 | SEQ ID NO 15 | SEQ ID NO 55 | 3900 |
| Preussia flanaganii | SEQ ID NO 16 | SEQ ID NO 56 | 1451 |
| Cladobotryum sp. | SEQ ID NO 17 | SEQ ID NO 18 | na |
| Westerdykella sp-46156 | SEQ ID NO 19 | SEQ ID NO 57 | 1309 |
| Trichoderma hamatum | SEQ ID NO 20 | SEQ ID NO 58 | 388 |
| Mycothermus | SEQ ID NO 21 | SEQ ID NO 59 | 2678 |
| thermophilus | | | |
| Cephalotrichiella | SEQ ID NO 22 | SEQ ID NO 60 | 1034 |
| pen icillata | | | |
| Chaetomiurn | SEQ ID NO 23 | SEQ ID NO 61 | 1641 |
| megalocarpum | | | |
| Chaetomiurn | SEQ ID NO 24 | SEQ ID NO 62 | 2451 |
| thermophilum var. | | | |
| thermophilum | | | |
| Humicola | SEQ ID NO 25 | SEQ ID NO 63 | 1293 |
| hyalothermophila | | | |
| Subramaniula | SEQ ID NO 26 | SEQ ID NO 64 | na |
| anamorphosa | | | |
| Sphingobacterium sp. T2 | SEQ ID NO 27 | SEQ ID NO 65 | 279 |
| Trichoderma rossicum | SEQ ID NO 28 | SEQ ID NO 66 | 1889 |
| Trichoderma lixii | SEQ ID NO 29 | SEQ ID NO 67 | 2701 |
| Trichoderma sp-54723 | SEQ ID NO 30 | SEQ ID NO 68 | 2662 |
| Aspergillus niveus | SEQ ID NO 31 | SEQ ID NO 69 | 3646 |
| Aspergillus templicola | SEQ ID NO 32 | SEQ ID NO 70 | 5483 |
| Pochonia chlamydosporia | SEQ ID NO 33 | SEQ ID NO 71 | 2026 |
| var. Spinulospora | | | |
| Trichoderma sp-44174 | SEQ ID NO 34 | SEQ ID NO 35 | 2937 |
| Trichoderma rossicum | SEQ ID NO 36 | SEQ ID NO 37 | 2615 |
| Trichoderma sp-54723 | SEQ ID NO 38 | SEQ ID NO 72 | 1298 |
| Trichoderma sp-44174 | SEQ ID NO 39 | SEQ ID NO 73 | 2314 |
| Metapochonia | SEQ ID NO 40 | SEQ ID NO 74 | 1938 |
| suchlasporia | | | |
| Metarhizium marquandii | SEQ ID NO 41 | SEQ ID NO 75 | 2808 |
| Diaporthe nobilis | SEQ ID NO 42 | SEQ ID NO 76 | 4348 |
| Tolypocladium sp. | SEQ ID NO 43 | SEQ ID NO 77 | 2052 |
| XZ2627 | | | |
| Aspergillus japonicus | SEQ ID NO 44 | SEQ ID NO 78 | 7754 |
| Metarhizium sp. XZ2431 | SEQ ID NO 45 | SEQ ID NO 79 | 6941 |
| Armillaria ostoyae | SEQ ID NO 46 | SEQ ID NO 80 | 1877 |
| Trichoderma spirale | SEQ ID NO 47 | SEQ ID NO 81 | 1290 |
| Aspergillus elegans | SEQ ID NO 48 | SEQ ID NO 82 | 2651 |
| Trichoderma sinuosum | SEQ ID NO | SEQ ID NO | |
| | 199 | 210 | 328 |
| Trichoderma virens | SEQ ID NO | SEQ ID NO | 684 |
| | 200 | 211 | |
| Trichoderma harzianum | SEQ ID NO | SEQ ID NO | 654 |
| | 201 | 212 | |
| Fusicolla acetilerea | SEQ ID NO | SEQ ID NO | 9527 |
| | 202 | 213 | |
| Plectosphaerella sp. 1-29 | SEQ ID NO | SEQ ID NO | 5952 |
| | 203 | 214 | |
| Mariannaea punicea | SEQ ID NO | SEQ ID NO | 4410 |
| | 204 | 215 | |
| Penicillium oxalicum | SEQ ID NO | SEQ ID NO | 16555 |
| | 205 | 216 | |
| Colletotrichum sp-71086 | SEQ ID NO | SEQ ID NO | 2483 |
| | 206 | 217 | |
| Aspergillus sp. nov. | SEQ ID NO | SEQ ID NO | 4018 |
| XZ3202 | 207 | 218 | |
| Trichoderma | SEQ ID NO | SEQ ID NO | 2525 |
| parapiluliferum | 208 | 219 | |
| Aspergillus sp. nov. | SEQ ID NO | SEQ ID NO | 5287 |
| XZ3202 | 209 | 220 | |
| Mucor sp. XZ2651 | SEQ ID NO | SEQ ID NO | 3,762 |
| | 232 | 238 | |
| Rhizomucor miehei | SEQ ID NO | SEQ ID NO | 4,406 |
| | 233 | 239 | |
| Mucor sp. XZ2651 | SEQ ID NO | SEQ ID NO | 8,182 |
| | 234 | 240 | |
| Amphisphaeriaceae sp- | SEQ ID NO | SEQ ID NO | 3,018 |
| 43674 | 235 | 241 | |
| Humicola fuscoatra | SEQ ID NO | SEQ ID NO | 5,744 |
| | 236 | 242 | |
| Valsaria rubricosa | SEQ ID NO | SEQ ID NO | 2,977 |
| | 237 | 243 | |

[1040] In one embodiment of the invention, the superoxide dismutase of fungal origin has an activity of at least 1000 U/mg at pH 7.8, such as at least 1500 U/mg, or at least 2000 U/mg, or at least 3000 U/mg, or at least 4000 U/mg, or at least 5000 U/mg, suitably as measured by the method described in Example 9.

[1041] SEQ ID NO 1, SEQ ID NO 9, SEQ ID NO 15, SEQ ID NO 21, SEQ ID NO 24, SEQ ID NO 28, SEQ ID NO 29, SEQ ID NO 30, SEQ ID NO 31, SEQ ID NO 32, SEQ ID NO 33, SEQ ID NO 34, SEQ ID NO 35, SEQ ID NO 39, SEQ ID NO 41, SEQ ID NO 42, SEQ ID NO 44, SEQ ID NO 45, and SEQ ID NO 48 all have an activity near, at or over 3000 U/mg EP when measured according to the method described in Example 9 or at pH 7.8.

### Gastric Stability of Superoxide Dismutases

[1042] In a preferred embodiment, the SOD, given it is intended for use as an animal feed additive, is gastric stable, when measured according to the method described in Example 10. As can be seen from the table in Example 10, the commercially available superoxide dismutase from bovine erythrocytes and expressed in E. coli of sequence A:

[1043] MATKAVCVLKGDGPVOGINFEAKGOTVVVTGSITGLTEGDHGFHVHQFGONTOGCTSAGPHFNPLSKKHGGPKO EERHVGDLGNVTADKNGVAIVIDIVDPLISLSGEYSIIGRTIVIVVHEKPDDLGRGGNEESTKTGNAGSRLACGVIGIAK retains only 26% of its activity upon gastric treatment in the presence of pepsin.

[1044] Two commercial SODs were tested as references: SOD-Mn, from E. coli Sigma S5639 with a activity of 10240 U/mg EP and only 26% activity left after gastric press for 30 min; and SOD-Cu/Zn from Bovine expressed in E. coli Sigma S9697 with activity of 6108 U/mg EP and only 35% activity left after gastric press for 30 min.

[1045] The fungal SODs of the invention were overwhelmingly and surprisingly found to have a very high gastric stability (see Gastric Stability Table). Moreover, some SODs even have higher activity under gastric stability studies than at the reference pH, indicating that they are more active at low pH. This makes fungal SODs very well suited for use in vivo by means of administration through animal feed.

Gastric Stability Table

| | | | Gastric stability |
|---|---|---|---|
| | | | after 15 min |
| | SEQ ID NO | SEQ ID NO | (remaining activity, |
| Source | Mature peptide | Full polypeptide | approx, %) |
| Trichoderma reesei | SEQ ID NO 1 | SEQ ID NO 83 | 100 |
| Preussia terricola | SEQ ID NO 11 | SEQ ID NO 51 | 70 |
| Kionochaeta sp. | SEQ ID NO 12 | SEQ ID NO 52 | 88 |
| Kionochaeta sp. | SEQ ID NO 13 | SEQ ID NO 53 | 92 |
| Metapochonia | SEQ ID NO 14 | SEQ ID NO 54 | 100 |
| bulbillosa | | | |
| Xylomelasma | SEQ ID NO 15 | SEQ ID NO 55 | 100 |
| sp. XZ0718 | | | |
| Preussia flanaganii | SEQ ID NO 16 | SEQ ID NO 56 | 90 |
| Cladobotryum sp. | SEQ ID NO 17 | SEQ ID NO 18 | 100 |
| Westerdykella | SEQ ID NO 19 | SEQ ID NO 57 | 52 |
| sp-46156 | | | |
| Trichoderma | SEQ ID NO 20 | SEQ ID NO 58 | 98 |
| hamatum | | | |
| Mycothermus | SEQ ID NO 21 | SEQ ID NO 59 | 40 |
| thermophilus | | | |
| Cephalotrichiella | SEQ ID NO 22 | SEQ ID NO 60 | 85 |
| penicillata | | | |
| Chaetomium | SEQ ID NO 23 | SEQ ID NO 61 | 45 |
| megalocarpum | | | |
| Chaetomium | SEQ ID NO 24 | SEQ ID NO 62 | 57 |
| thermophilum | | | |
| var. Thermophilum | | | |
| Humicola | SEQ ID NO 25 | SEQ ID NO 63 | 62 |
| hyalothermophila | | | |
| Subramaniula | SEQ ID NO 26 | SEQ ID NO 64 | 97 |
| anamorphosa | | | |
| Sphingobacterium | SEQ ID NO 27 | SEQ ID NO 65 | 78 |
| sp. T2 | | | |
| Trichoderma | SEQ ID NO 28 | SEQ ID NO 66 | 128 |
| rossicum | | | |
| Trichoderma lixii | SEQ ID NO 29 | SEQ ID NO 67 | 144 |
| Trichoderma | SEQ ID NO 30 | SEQ ID NO 68 | 124 |
| sp-54723 | | | |
| Aspergillus niveus | SEQ ID NO 31 | SEQ ID NO 69 | 126 |
| Aspergillus | SEQ ID NO 32 | SEQ ID NO 70 | 90 |
| templicola | | | |
| Pochonia | | | |
| chlamydosporia | | | |
| var. | | | |
| Spinulospora | SEQ ID NO 33 | SEQ ID NO 71 | 105 |
| Trichoderma | SEQ ID NO 34 | SEQ ID NO 35 | 120 |
| sp-44174 | | | |
| Trichoderma | SEQ ID NO 36 | SEQ ID NO 37 | 96 |
| rossicum | | | |
| Trichoderma | SEQ ID NO 38 | SEQ ID NO 72 | 100 |
| sp-54723 | | | |
| Trichoderma | SEQ ID NO 39 | SEQ ID NO 73 | 104 |
| sp-44174 | | | |
| Metapochonia | SEQ ID NO 40 | SEQ ID NO 74 | 83 |
| suchlasporia | | | |
| Metarhizium | SEQ ID NO 41 | SEQ ID NO 75 | 118 |
| marquandii | | | |
| Diaporthe nobilis | SEQ ID NO 42 | SEQ ID NO 76 | 98 |
| Tolypocladium | SEQ ID NO 43 | SEQ ID NO 77 | 109 |
| sp. XZ2627 | | | |
| Aspergillus | SEQ ID NO 44 | SEQ ID NO 78 | 104 |
| japonicus | | | |
| Metarhizium | SEQ ID NO 45 | SEQ ID NO 79 | 104 |
| sp. XZ2431 | | | |
| Armillaria | SEQ ID NO 46 | SEQ ID NO 80 | 79 |
| ostoyae | | | |
| Trichoderma | SEQ ID NO 47 | SEQ ID NO 81 | 41 |
| spirale | | | |
| Aspergillus | SEQ ID NO 48 | SEQ ID NO 82 | 61 |
| elegans | | | |
| Trichoderma | SEQ ID NO 199 | SEQ ID NO 210 | 99 |
| sinuosum | | | |
| Trichoderma | SEQ ID NO 200 | SEQ ID NO 211 | 73 |
| virens | | | |
| Trichoderma | SEQ ID NO 201 | SEQ ID NO 212 | 80 |
| harzianum | | | |
| Fusicolla | SEQ ID NO 202 | SEQ ID NO 213 | 25 |
| acetilerea | | | |
| Plectosphaerella | SEQ ID NO 203 | SEQ ID NO 214 | 23 |
| sp. 1-29 | | | |
| Mariannaea | SEQ ID NO 204 | SEQ ID NO 215 | 23 |
| punicea | | | |
| Penicillium | SEQ ID NO 205 | SEQ ID NO 216 | 30 |
| oxalicum | | | |
| Colletotrichum | SEQ ID NO 206 | SEQ ID NO 217 | 81 |
| sp-71086 | | | |
| Aspergillus sp. | SEQ ID NO 207 | SEQ ID NO 218 | 72 |
| nov. XZ3202 | | | |
| Trichoderma | SEQ ID NO 208 | SEQ ID NO 219 | 97 |
| parapiluliferum | | | |
| Aspergillus sp. | SEQ ID NO 209 | SEQ ID NO 220 | 92 |
| nov. XZ3202 | | | |
| Mucor sp. XZ2651 | SEQ ID NO 232 | SEQ ID NO 238 | 99 |
| Rhizomucor miehei | SEQ ID NO 233 | SEQ ID NO 239 | 90 |
| Mucor sp. XZ2651 | SEQ ID NO 234 | SEQ ID NO 240 | 113 |
| Amphisphaeriaceae | SEQ ID NO 235 | SEQ ID NO 241 | 34 |
| sp-43674 | | | |
| Hum icola | SEQ ID NO 236 | SEQ ID NO 242 | 57 |
| fuscoatra | | | |
| Valsaria rubricosa | SEQ ID NO 237 | SEQ ID NO 243 | 72 |
| S5639 from | | | 26 |
| Sigma Mn-SOD | | | |
| Escherichia coli | | | |
| S9697 Bovine | | | 35 |
| Cu/Zn SOD | | | |
| SIGMA | | | |

[1046] One aspect of the invention is directed to an animal feed additive comprising a superoxide dismutase of fungal origin, wherein the superoxide dismutase retains 40% activity, at least 50% activity, such as retains at least 55% activity, such as retains at least 60% activity, such as retains at least 65% activity, such as retains at least 70% activity, such as retaining at least 75% activity, such as retains at least 80% activity, most preferably at least 85% activity, or 90%, or 95% activity under gastric stability studies as measure by the method of Example 10.

[1047] One aspect of the invention is directed to an animal feed additive comprising a fungal superoxide dismutase wherein the superoxide dismutase has improved gastric stability compared to sequence A, such that the superoxide dismutase is gastric stable such that it retains at least 40% of its activity when measured according to the test method described in Example 10, such as retaining at least 50% activity, such as retaining at least 55% activity, such as retaining at least 60% activity, such as retaining at least 65% activity, such as retaining at least 70% activity, such as retaining at least 75% activity, such as retaining at least 80% activity.

[1048] As can be seen from the Table in Example 10 and the Gastric Stability Table, each of SED ID NO 1, SEQ ID NO 83, SEQ ID NO 11, SEQ ID NO 51, SEQ ID NO 12, SEQ ID NO 52, SEQ ID NO 13, SEQ ID NO 53, SEQ ID NO 14, SEQ ID NO 54, SEQ ID NO 15, SEQ ID NO 55, SEQ ID NO 16, SEQ ID NO 56, SEQ ID NO 17, SEQ ID NO 18, SEQ ID NO 19, SEQ ID NO 57, SEQ ID NO 20, SEQ ID NO 58, SEQ ID NO 21, SEQ ID NO 59, SEQ ID NO 22, SEQ ID NO 60, SEQ ID NO 23, SEQ ID NO 61, SEQ ID NO 24, SEQ ID NO 62, SEQ ID NO 25, SEQ ID NO 63, SEQ ID NO 26, SEQ ID NO 64, SEQ ID NO 27, SEQ ID NO 65, SEQ ID NO 28, SEQ ID NO 66, SEQ ID NO 29, SEQ ID NO 67, SEQ ID NO 30, SEQ ID NO 68, SEQ ID NO 31, SEQ ID NO 69, SEQ ID NO 32, SEQ ID NO 70, SEQ ID NO 33, SEQ ID NO 71, SEQ ID NO 34, SEQ ID NO 35, SEQ ID NO 36, SEQ ID NO 37, SEQ ID NO 38, SEQ ID NO 72, SEQ ID NO 39, SEQ ID NO 73, SEQ ID NO 40, SEQ ID NO 74, SEQ ID NO 41, SEQ ID NO 75, SEQ ID NO 42, SEQ ID NO 76, SEQ ID NO 43, SEQ ID NO 77, SEQ ID NO 44, SEQ ID NO 78, SEQ ID NO 45, SEQ ID NO 79, SEQ ID NO 46, SEQ ID NO 80, SEQ ID NO 47, SEQ ID NO 81, SEQ ID NO 48, SEQ ID NO 82, SEQ ID NO 199, SEQ ID NO 210, SEQ ID NO 200, SEQ ID NO 211, SEQ ID NO 201, SEQ ID NO 212, SEQ ID NO 206, SEQ ID NO 217, SEQ ID NO 207, SEQ ID NO 218, SEQ ID NO 208, SEQ ID NO 219, SEQ ID NO 209, SEQ ID NO 220, SEQ ID NO 232, SEQ ID NO 238, SEQ ID NO 233, SEQ ID NO 239, SEQ ID NO 234, SEQ ID NO 240, SEQ ID NO 236, SEQ ID NO 242, SEQ ID NO 237 and SEQ ID NO 243 retain at least 40% of their activity under gastric stability studies, when measured according to the test method described in Example 10.

[1049] Accordingly, in one embodiment the polypeptide having superoxide dismutase activity may be selected a polypeptide having at least 80% sequence identity, such as at least 85% sequence identity, such as at least 90% sequence identity, such as at least 95% sequence identity, such as at least 98% sequence identity, such as at least 99% sequence identity of a polypeptide selected from the group consisting of SED ID NO 1, SEQ ID NO 83, SEQ ID NO 11, SEQ ID NO 51, SEQ ID NO 12, SEQ ID NO 52, SEQ ID NO 13, SEQ ID NO 53, SEQ ID NO 14, SEQ ID NO 54, SEQ ID NO 15, SEQ ID NO 55, SEQ ID NO 16, SEQ ID NO 56, SEQ ID NO 17, SEQ ID NO 18, SEQ ID NO 19, SEQ ID NO 57, SEQ ID NO 20, SEQ ID NO 58, SEQ ID NO 21, SEQ ID NO 59, SEQ ID NO 22, SEQ ID NO 60, SEQ ID NO 23, SEQ ID NO 61, SEQ ID NO 24, SEQ ID NO 62, SEQ ID NO 25, SEQ ID NO 63, SEQ ID NO 26, SEQ ID NO 64, SEQ ID NO 27, SEQ ID NO 65, SEQ ID NO 28, SEQ ID NO 66, SEQ ID NO 29, SEQ ID NO 67, SEQ ID NO 30, SEQ ID NO 68, SEQ ID NO 31, SEQ ID NO 69, SEQ ID NO 32, SEQ ID NO 70, SEQ ID NO 33, SEQ ID NO 71, SEQ ID NO 34, SEQ ID NO 35, SEQ ID NO 36, SEQ ID NO 37, SEQ ID NO 38, SEQ ID NO 72, SEQ ID NO 39, SEQ ID NO 73, SEQ ID NO 40, SEQ ID NO 74, SEQ ID NO 41, SEQ ID NO 75, SEQ ID NO 42, SEQ ID NO 76, SEQ ID NO 43, SEQ ID NO 77, SEQ ID NO 44, SEQ ID NO 78, SEQ ID NO 45, SEQ ID NO 79, SEQ ID NO 46, SEQ ID NO 80, SEQ ID NO 47, SEQ ID NO 81, SEQ ID NO 48, SEQ ID NO 82, SEQ ID NO 199, SEQ ID NO 210, SEQ ID NO 200, SEQ ID NO 211, SEQ ID NO 201, SEQ ID NO 212, SEQ ID NO 206, SEQ ID NO 217, SEQ ID NO 207, SEQ ID NO 218, SEQ ID NO 208, SEQ ID NO 219, SEQ ID NO 209, SEQ ID NO 220, SEQ ID NO 232, SEQ ID NO 238, SEQ ID NO 233, SEQ ID NO 239, SEQ ID NO 234, SEQ ID NO 240, SEQ ID NO 236, SEQ ID NO 242, SEQ ID NO 237 and SEQ ID NO 243. Typically, these SODs retain at least 40% of their activity under gastric stability studies, when measured according to the test method described in Example 10.

[1050] In a more preferred embodiment, the fungal SOD of the invention retains at least 50% of its activity under gastric stability studies. Accordingly, in more preferred embodiment, the the polypeptide having superoxide dismutase activity may be selected a polypeptide having at least 80% sequence identity, such as at least 85% sequence identity, such as at least 90% sequence identity, such as at least 95% sequence identity, such as at least 98% sequence identity, such as at least 99% sequence identity of a polypeptide selected from the group consisting of SED ID NO 1, SEQ ID NO 83, SEQ ID NO 11, SEQ ID NO 51, SEQ ID NO 12, SEQ ID NO 52, SEQ ID NO 13, SEQ ID NO 53, SEQ ID NO 14, SEQ ID NO 54, SEQ ID NO 15, SEQ ID NO 55, SEQ ID NO 16, SEQ ID NO 56, SEQ ID NO 17, SEQ ID NO 18, SEQ ID NO 19, SEQ ID NO 57, SEQ ID NO 20, SEQ ID NO 58, SEQ ID NO 22, SEQ ID NO 60, SEQ ID NO 24, SEQ ID NO 62, SEQ ID NO 25, SEQ ID NO 63, SEQ ID NO 26, SEQ ID NO 64, SEQ ID NO 27, SEQ ID NO 65, SEQ ID NO 28, SEQ ID NO 66, SEQ ID NO 29, SEQ ID NO 67, SEQ ID NO 30, SEQ ID NO 68, SEQ ID NO 31, SEQ ID NO 69, SEQ ID NO 32, SEQ ID NO 70, SEQ ID NO 33, SEQ ID NO 71, SEQ ID NO 34, SEQ ID NO 35, SEQ ID NO 36, SEQ ID NO 37, SEQ ID NO 38, SEQ ID NO 72, SEQ ID NO 39, SEQ ID NO 73, SEQ ID NO 40, SEQ ID NO 74, SEQ ID NO 41, SEQ ID NO 75, SEQ ID NO 42, SEQ ID NO 76, SEQ ID NO 43, SEQ ID NO 77, SEQ ID NO 44, SEQ ID NO 78, SEQ ID NO 45, SEQ ID NO 79, SEQ ID NO 46, SEQ ID NO 80, SEQ ID NO 48, SEQ ID NO 82, SEQ ID NO 199, SEQ ID NO 210, SEQ ID NO 200, SEQ ID NO 211, SEQ ID NO 201, SEQ ID NO 212, SEQ ID NO 206, SEQ ID NO 217, SEQ ID NO 207, SEQ ID NO 218, SEQ ID NO 208, SEQ ID NO 219, SEQ ID NO 209, SEQ ID NO 220, SEQ ID NO 232, SEQ ID NO 238, SEQ ID NO 233, SEQ ID NO 239, SEQ ID NO 234, SEQ ID NO 240, SEQ ID NO 236, SEQ ID NO 242, SEQ ID NO 237 and SEQ ID NO 243. Typically, these SODs retain at least 50% of their activity under gastric stability studies, when measured according to the test method described in Example 10.

[1051] In a more preferred embodiment, the fungal SOD of the invention retains at least 60% of its activity under gastric stability studies. Accordingly, in more preferred embodiment, the the polypeptide having superoxide dismutase activity may be selected a polypeptide having at least 80% sequence identity, such as at least 85% sequence identity, such as at least 90% sequence identity, such as at least 95% sequence identity, such as at least 98% sequence identity, such as at least 99% sequence identity of a polypeptide selected from the group consisting of SED ID NO 1, SEQ ID NO 83, SEQ ID NO 11, SEQ ID NO 51, SEQ ID NO 12, SEQ ID NO 52, SEQ ID NO 13, SEQ ID NO 53, SEQ ID NO 14, SEQ ID NO 54, SEQ ID NO 15, SEQ ID NO 55, SEQ ID NO 16, SEQ ID NO 56, SEQ ID NO 17, SEQ ID NO 18, SEQ ID NO 20, SEQ ID NO 58, SEQ ID NO 22, SEQ ID NO 60, SEQ ID NO 25, SEQ ID NO 63, SEQ ID NO 26, SEQ ID NO 64, SEQ ID NO 27, SEQ ID NO 65, SEQ ID NO 28, SEQ ID NO 66, SEQ ID NO 29, SEQ ID NO 67, SEQ ID NO 30, SEQ ID NO 68, SEQ ID NO 31, SEQ ID NO 69, SEQ ID NO 32, SEQ ID NO 70, SEQ ID NO 33, SEQ ID NO 71, SEQ ID NO 34, SEQ ID NO 35, SEQ ID NO 36, SEQ ID NO 37, SEQ ID NO 38, SEQ ID NO 72, SEQ ID NO 39, SEQ ID NO 73, SEQ ID NO 40, SEQ ID NO 74, SEQ ID NO 41, SEQ ID NO 75, SEQ ID NO 42, SEQ ID NO 76, SEQ ID NO 43, SEQ ID NO 77, SEQ ID NO 44, SEQ ID NO 78, SEQ ID NO 45, SEQ ID NO 79, SEQ ID NO 46, SEQ ID NO 80, SEQ ID NO 48, SEQ ID NO 82, SEQ ID NO 199, SEQ ID NO 210, SEQ ID NO 200, SEQ ID NO 211, SEQ ID NO 201, SEQ ID NO 212, SEQ ID NO 206, SEQ ID NO 217, SEQ ID NO 207, SEQ ID NO 218, SEQ ID NO 208, SEQ ID NO 219, SEQ ID NO 209, SEQ ID NO 220, SEQ ID NO 232, SEQ ID NO 238, SEQ ID NO 233, SEQ ID NO 239, SEQ ID NO 234, SEQ ID NO 240, SEQ ID NO 237 and SEQ ID NO 243. Typically, these SODs retain at least 60% of their activity under gastric stability studies, when measured according to the test method described in Example 10.

[1052] In a more preferred embodiment, the fungal SOD of the invention retains at least 70% of its activity under gastric stability studies. Accordingly, in more preferred embodiment, the the polypeptide having superoxide dismutase activity may be selected a polypeptide having at least 80% sequence identity, such as at least 85% sequence identity, such as at least 90% sequence identity, such as at least 95% sequence identity, such as at least 98% sequence identity, such as at least 99% sequence identity of a polypeptide selected from the group consisting of SED ID NO 1, SEQ ID NO 83, SEQ ID NO 11, SEQ ID NO 51, SEQ ID NO 12, SEQ ID NO 52, SEQ ID NO 13, SEQ ID NO 53, SEQ ID NO 14, SEQ ID NO 54, SEQ ID NO 15, SEQ ID NO 55, SEQ ID NO 16, SEQ ID NO 56, SEQ ID NO 17, SEQ ID NO 18, SEQ ID NO 20, SEQ ID NO 58, SEQ ID NO 22, SEQ ID NO 60, SEQ ID NO 26, SEQ ID NO 64, SEQ ID NO 27, SEQ ID NO 65, SEQ ID NO 28, SEQ ID NO 66, SEQ ID NO 29, SEQ ID NO 67, SEQ ID NO 30, SEQ ID NO 68, SEQ ID NO 31, SEQ ID NO 69, SEQ ID NO 32, SEQ ID NO 70, SEQ ID NO 33, SEQ ID NO 71, SEQ ID NO 34, SEQ ID NO 35, SEQ ID NO 36, SEQ ID NO 37, SEQ ID NO 38, SEQ ID NO 72, SEQ ID NO 39, SEQ ID NO 73, SEQ ID NO 40, SEQ ID NO 74, SEQ ID NO 41, SEQ ID NO 75, SEQ ID NO 42, SEQ ID NO 76, SEQ ID NO 43, SEQ ID NO 77, SEQ ID NO 44, SEQ ID NO 78, SEQ ID NO 45, SEQ ID NO 79, SEQ ID NO 46, SEQ ID NO 80, SEQ ID NO 199, SEQ ID NO 210, SEQ ID NO 200, SEQ ID NO 211, SEQ ID NO 201, SEQ ID NO 212, SEQ ID NO 206, SEQ ID NO 217, SEQ ID NO 207, SEQ ID NO 218, SEQ ID NO 208, SEQ ID NO 219, SEQ ID NO 209, SEQ ID NO 220, SEQ ID NO 232, SEQ ID NO 238, SEQ ID NO 233, SEQ ID NO 239, SEQ ID NO 234, SEQ ID NO 240, SEQ ID NO 237 and SEQ ID NO 243. Typically, these SODs retain at least 70% of their activity under gastric stability studies, when measured according to the test method described in Example 10.

[1053] In a more preferred embodiment, the fungal SOD of the invention retains at least 80% of its activity under gastric stability studies. Accordingly, in more preferred embodiment, the the polypeptide having superoxide dismutase activity may be selected a polypeptide having at least 80% sequence identity, such as at least 85% sequence identity, such as at least 90% sequence identity, such as at least 95% sequence identity, such as at least 98% sequence identity, such as at least 99% sequence identity of a polypeptide selected from the group consisting of SED ID NO 1, SEQ ID NO 83, SEQ ID NO 11, SEQ ID NO 12, SEQ ID NO 52, SEQ ID NO 13, SEQ ID NO 53, SEQ ID NO 14, SEQ ID NO 54, SEQ ID NO 15, SEQ ID NO 55, SEQ ID NO 16, SEQ ID NO 56, SEQ ID NO 17, SEQ ID NO 18, SEQ ID NO 20, SEQ ID NO 58, SEQ ID NO 22, SEQ ID NO 60, SEQ ID NO 26, SEQ ID NO 64, SEQ ID NO 28, SEQ ID NO 66, SEQ ID NO 29, SEQ ID NO 67, SEQ ID NO 30, SEQ ID NO 68, SEQ ID NO 31, SEQ ID NO 69, SEQ ID NO 32, SEQ ID NO 70, SEQ ID NO 33, SEQ ID NO 71, SEQ ID NO 34, SEQ ID NO 35, SEQ ID NO 36, SEQ ID NO 37, SEQ ID NO 38, SEQ ID NO 72, SEQ ID NO 39, SEQ ID NO 73, SEQ ID NO 40, SEQ ID NO 74, SEQ ID NO 41, SEQ ID NO 75, SEQ ID NO 42, SEQ ID NO 76, SEQ ID NO 43, SEQ ID NO 77, SEQ ID NO 44, SEQ ID NO 78, SEQ ID NO 45, SEQ ID NO 79, SEQ ID NO 46, SEQ ID NO 80, SEQ ID NO 199, SEQ ID NO 210, SEQ ID NO 206, SEQ ID NO 217, SEQ ID NO 208, SEQ ID NO 219, SEQ ID NO 209, SEQ ID NO 220, SEQ ID NO 232, SEQ ID NO 238, SEQ ID NO 233, SEQ ID NO 239, SEQ ID NO 234 and SEQ ID NO 240. Typically, these SODs retain at least 80% of their activity under gastric stability studies, when measured according to the test method described in Example 10.

[1054] In a combination of preferred embodiments, the superoxide dismutase is of fungal origin, and preferably has an activity of at least 1500 U/mg at pH 7.8 and is gastric stable such that it retains at least 70% of its activity under the gastric stability test. In an alternative combination of preferred embodiments, the superoxide dismutase is of fungal origin, and preferably has an activity of at least 5000 U/mg at pH 7.8 and is gastric stable such that it retains at least 20% of its activity under the gastric stability test.

[1055] Preferred polypeptide of fungal origin having superoxide dismutase activity have at least 75%, at least 80%, at least 85%, at least 86%, at least 87%, at least 88%, at least 89%, at least 90%, at least 91%, at least 92%, at least 93%, at least 94%, at least 95%, at least 96%, at least 97%, at least 98%, at least 99%, or 100% sequence identity to polypeptides selected from the group consisting of SEQ ID NO 1, SEQ ID NO 83, SEQ ID NO 32, SEQ ID NO 70, SEQ ID NO 42, SEQ ID NO 76, SEQ ID NO 44, SEQ ID NO 78, SEQ ID NO 46, SEQ ID NO 80, SEQ ID NO 202 and SEQ ID NO 213.

### Thermal Stability of Superoxide Dismutase

[1056] The commercially available E.coli and bovine SODs are tested at 25° C. and stored at -20° C. An animal feed additive for use in animal feed is prepared by a pelleting process, transported by land or sea, stored, and consumed by animals with body temperatures over 30° C. and at gastric pH conditions. Transport and pelleting may lead to temperatures reaching 45° C. Accordingly, thermal stability in each of these conditions is highly pertinent for use of a super oxide dismutase in an animal feed additive.

[1057] Test were performed on the super oxide dismutases of the invention to measure the temperature at different acidity/alkalinity to determine the temperature at which the polypeptide unfolds and denatures. As can be seen, from the “Thermal Stability Table with pH”, unfolding of the fungal superoxide dismutase takes place at over 45° C., as measured by the Tm, for all fungal superoxide dismutases at neutral pH (pH7). A further embodiment is directed to an animal feed additive comprising a fungal superoxide dismutase thermally stable at pH 7, when measured according to the method described in Example 11, such that protein unfolding (Tm) is 45° C. or more.

[1058] At gastric pH (pH 3), fungal superoxide dismutases have been found to be stable at normal body temperatures for farm animals. A further embodiment of the invention is directed to an animal feed additive comprising a fungal superoxide dismutase thermally stable at pH 3, when measured according to the method described in Example 11, such that protein unfolding (Tm) is 35° C. or more, such as 40° C. or more, such as 45° C. or more.

[1059] In a preferred embodiment, the animal feed additive of the invention is thermal stable, when measured according to the method described in Example 11. The commercially available superoxide dismutase from bovine erythrocytes and expressed in E. coli of sequence A: MATKAVCVLKGDGPVOGINFEAKGOTVVVTGSITGLTEGDHGFHVHQFGONTQGCTSAGPHFNPLSKKHGGPKD EERHVGDLGNVTADKNGVAIVIDIVDPLISLSGEYSIIGRTIVIVVHEKPDDLGRGGNEESTKTGNAGSRLACGVIGIAK retains very little of its activity at 50 ° C.

[1060] Accordingly, one aspect of the invention is directed to an animal feed additive comprising a fungal superoxide dismutase wherein the superoxide dismutase is thermal stable such that it retains at least 40% of its activity when measured at 50 ° C. according to the test method described in Example 11, such as retaining at least 50% activity, such as retaining at least 55% activity, such as retaining at least 60% activity, such as retaining at least 65% activity, such as retaining at least 70% activity, such as retaining at least 75% activity, such as retaining at least 80% activity.

Thermal Stability Table at different pH-Tm (unfolding temperature)

| SEQ ID | SEQ ID | Tₘ/pH | | | | | | | |
|---|---|---|---|---|---|---|---|---|---|
| NO | NO | 3 | 4 | 5 | 6 | 7 | 8 | 9 | 10 |
| SED ID | SEQ ID | 67.1 | 75.0 | 75.5 | 75.4 | 63.6 | 63.0 | 61.2 | 59.4 |
| NO 1 | NO 83 | | | | | | | | |
| SEQ ID | SEQ ID | na | na | 56.7 | 63.4 | 67.9 | 66.6 | 64.8 | 69.2 |
| NO 9 | NO 49 | | | | | | | | |
| SEQ ID | SEQ ID | 46.6 | 54.3 | 55.5 | 56.9 | 56.7 | 53.4 | 48.9 | 44.1 |
| NO 10 | NO 50 | | | | | | | | |
| SEQ ID | SEQ ID | 44.6 | 56.7 | 61.9 | 61.2 | 56.6 | 54.0 | 50.5 | 45.8 |
| NO 11 | NO 51 | | | | | | | | |
| SEQ ID | SEQ ID | na | 43.0 | 48.0 | 48.8 | 48.1 | 47.0 | 46.2 | 45.3 |
| NO 12 | NO 52 | | | | | | | | |
| SEQ ID | SEQ ID | na | 45.2 | 49.6 | 50.1 | 49.3 | 48.4 | 47.3 | na |
| NO 13 | NO 53 | | | | | | | | |
| SEQ ID | SEQ ID | na | na | na | na | na | 55.5 | 54.4 | 53.2 |
| NO 14 | NO 54 | | | | | | | | |
| SEQ ID | SEQ ID | 52.9 | 63.0 | 64.6 | 59.1 | 53.6 | 51.7 | 50.7 | 49.7 |
| NO 15 | NO 55 | | | | | | | | |
| SEQ ID | SEQ ID | na | 37.6 | 48.7 | 54.3 | 55.0 | 55.6 | 54.6 | 53.7 |
| NO 16 | NO 56 | | | | | | | | |
| SEQ ID | SEQ ID | na | 37.9 | 48.4 | 53.6 | 53.7 | 54.3 | 53.3 | 53.0 |
| NO 17 | NO 18 | | | | | | | | |
| SEQ ID | SEQ ID | na | na | Na | 66.3 | 70.7 | 70.6 | 71.1 | 71.6 |
| NO 19 | NO 57 | | | | | | | | |
| SEQ ID | SEQ ID | na | na | 50.9 | 61.8 | 63.5 | 61.1 | 59.8 | 51.8 |
| NO 21 | NO 59 | | | | | | | | |
| SEQ ID | SEQ ID | 43.7 | 53.3 | 59.3 | 59.3 | 58.1 | 62.1 | 57.7 | 51.1 |
| NO 22 | NO 60 | | | | | | | | |
| SEQ ID | SEQ ID | 43.3 | 51.9 | 58.8 | 59.5 | 57.6 | 53.9 | 52.8 | 50.6 |
| NO 23 | NO 61 | | | | | | | | |
| SEQ ID | SEQ ID | 43.9 | 52.3 | 59.2 | 63.7 | 62.3 | 61.8 | 59.9 | 59.2 |
| NO 24 | NO 62 | | | | | | | | |
| SEQ ID | SEQ ID | 40.6 | 49.2 | 58.1 | 62.8 | 62.1 | 54.7 | 54.2 | 60.8 |
| NO 25 | NO 63 | | | | | | | | |
| SEQ ID | SEQ ID | 50.9 | 64.6 | 68.4 | 73.4 | 74.9 | 74.2 | 73.9 | 72.8 |
| NO 27 | NO 65 | | | | | | | | |
| SEQ ID | SEQ ID | 62.0 | 72.3 | 74.6 | 74.5 | 71.9 | 63.8 | 58.3 | 56.0 |
| NO 28 | NO 66 | | | | | | | | |
| SEQ ID | SEQ ID | 63.7 | 71.0 | 73.0 | 72.9 | 70.6 | 62.5 | 57.2 | 55.7 |
| NO 29 | NO 67 | | | | | | | | |
| SEQ ID | SEQ ID | 62.8 | 71.3 | 73.2 | 73.2 | 71.3 | 63.9 | 57.4 | 55.3 |
| NO 30 | NO 68 | | | | | | | | |
| SEQ ID | SEQ ID | 74.5 | 78.7 | 78.5 | 76.1 | 70.4 | 64.6 | 58.6 | 46.8 |
| NO 31 | NO 69 | | | | | | | | |
| SEQ ID | SEQ ID | 54.3 | 66.7 | 65.2 | 71.6 | 72.5 | 69.7 | 62.2 | 54.6 |
| NO 32 | NO 70 | | | | | | | | |
| SEQ ID | SEQ ID | 54.9 | 63.0 | 68.2 | 68.2 | 66.7 | 64.1 | 62.8 | 61.8 |
| NO 33 | NO 71 | | | | | | | | |
| SEQ ID | SEQ ID | 67.1 | 75.5 | 77.0 | 76.4 | 73.6 | 66.5 | 60.7 | 58.3 |
| NO 34 | NO 35 | | | | | | | | |
| SEQ ID | SEQ ID | 58.8 | 60.9 | 59.9 | 65.2 | 66.5 | 63.6 | 56.3 | 54.4 |
| NO 36 | NO 37 | | | | | | | | |
| SEQ ID | SEQ ID | 60.5 | 71.0 | 72.8 | 72.7 | 71.3 | 60.9 | 57.6 | 55.3 |
| NO 38 | NO 72 | | | | | | | | |
| SEQ ID | SEQ ID | 68.0 | 76.2 | 76.9 | 76.2 | 73.7 | 65.0 | 60.6 | 58.1 |
| NO 39 | NO 73 | | | | | | | | |
| SEQ ID | SEQ ID | 52.8 | 67.6 | 74.7 | 74.2 | 69.2 | 55.9 | 54.1 | 51.9 |
| NO 40 | NO 74 | | | | | | | | |
| SEQ ID | SEQ ID | 53.3 | 68.3 | 75.1 | 77.9 | 75.3 | 64.8 | 59.7 | 56.5 |
| NO 41 | NO 75 | | | | | | | | |
| SEQ ID | SEQ ID | 47.8 | 58.4 | 62.8 | 64.3 | 64.0 | 59.4 | 54.7 | 50.3 |
| NO 42 | NO 76 | | | | | | | | |
| SEQ ID | SEQ ID | 49.5 | 52.9 | 58.5 | 60.3 | 59.0 | 57.0 | 52.8 | 49.8 |
| NO 43 | NO 77 | | | | | | | | |
| SEQ ID | SEQ ID | 51.8 | 67.7 | 74.2 | 76.8 | 77.2 | 83.7 | 77.6 | 65.8 |
| NO 44 | NO 78 | | | | | | | | |
| SEQ ID | SEQ ID | 52.5 | 56.4 | 63.3 | 65.8 | 58.9 | 61.4 | 53.5 | 50.1 |
| NO 45 | NO 79 | | | | | | | | |
| SEQ ID | SEQ ID | 75.3 | 86.5 | >95 | >95 | >95 | 91.1 | 88.9 | 86.8 |
| NO 46 | NO 80 | | | | | | | | |
| SEQ ID | SEQ ID | 46.5 | 57.9 | 62.0 | 61.5 | 57.8 | 56.1 | 52.1 | 51.6 |
| NO 47 | NO 81 | | | | | | | | |
| SEQ ID | SEQ ID | 53.5 | 58.4 | 64.3 | 65.8 | 63.3 | 59.5 | 49.4 | 43.4 |
| NO 48 | NO 82 | | | | | | | | |
| SEQ ID | SEQ ID | 48.9 | na | na | 58.8 | 58.4 | na | 53.5 | 48 |
| NO 199 | NO 210 | | | | | | | | |
| SEQ ID | SEQ ID | na | 61.1 | na | na | 57.1 | 54.9 | na | 47.5 |
| NO 200 | NO 211 | | | | | | | | |
| SEQ ID | SEQ ID | na | na | na | 56.9 | 55.5 | 53.5 | 51.9 | 49.6 |
| NO 201 | NO 212 | | | | | | | | |
| SEQ ID | SEQ ID | 56.7 | 69.4 | 59.9 | 62 | 64.8 | 64.7 | 63.4 | 56.5 |
| NO 202 | NO 213 | | | | | | | | |
| SEQ ID | SEQ ID | 55.3 | na | 63.9 | na | 58.2 | 55.1 | 52.6 | 46 |
| NO 203 | NO 214 | | | | | | | | |
| SEQ ID | SEQ ID | na | na | 59.4 | 60 | na | na | na | 49.2 |
| NO 204 | NO 215 | | | | | | | | |
| SEQ ID | SEQ ID | 57.3 | 66.6 | 68.8 | 68.2 | 64.3 | 57 | 54.1 | 51.8 |
| NO 205 | NO 216 | | | | | | | | |
| SEQ ID | SEQ ID | na | na | na | na | 65.7 | 63.6 | 51.2 | 45.2 |
| NO 206 | NO 217 | | | | | | | | |
| SEQ ID | SEQ ID | na | 72.4 | 81.2 | 84.8 | 86.1 | 86.3 | 86.1 | 85.4 |
| NO 207 | NO 218 | | | | | | | | |
| SEQ ID | SEQ ID | na | 70.5 | 80.1 | 83.1 | 85 | 85.4 | 85.5 | 84.5 |
| NO 208 | NO 219 | | | | | | | | |
| SEQ ID | SEQ ID | na | 72.9 | 81.7 | 84.8 | 86.1 | 86.6 | 86.3 | 85.6 |
| NO 209 | NO 220 | | | | | | | | |

| | | | | | | | | |
|---|---|---|---|---|---|---|---|---|
| Bovine SOD S9697 | 50.8 | 59.3 | 63.9 | 66.2 | 65.2 | 63.1 | 61.0 | 57.0 |
| SIGMA | | | | | | | | |

### Animal Feed Additive and Animal Feed

[1061] The invention is directed to an an animal feed additive and to an animal feed comprising the animal feed additive as defined herein. An aspect of the invention is directed to an animal feed additive comprising a polypeptide of fungal origin having catalase activity. The animal feed additive may further comprising a superoxide dismutase.

[1062] The animal feed additive may alternatively be defined as comprising an enzyme component, wherein the enzyme component comprises all of the enzymes of the additive and the enzyme component consists of a catalase of fungal origin and optionally of a superoxide dismutase.

[1063] In a further apect, the invention is directed to an animal feed additive comprising at least one and no more than two enzyme classes, wherein the at least one enzyme class is a catalase of fungal origin and the optional second enzyme class is a superoxide dismutase, preferably also of fungal origin.

[1064] In a further apect, the invention is directed to an animal feed additive comprising at least one and no more than two enzyme classes, wherein the at least one enzyme class is a catalase of fungal origin, wherein the catalase is selected from a polypeptide having catalase activity and obtained from, obtainable from, or derivable from a source selected from the group consisting of Aspergillus niger, Thermoascus aurantiacus, Aspergillus lentulus, Scytalidium thermophilum, Talaromyces stipitatus, Malbranchea cinnamomea, Crassicarpon thermophilum, Penicillium emersonii, Aspergillus versicolor, Thermomucor indicae-seudaticae, Aspergillus fumigatus, Thermothelomyces thermophilus, Curvularia verruculosa, Mycothermus thermophilus, Penicillium oxalicum, Humicola hyalothermophila, Thermoascus crustaceus, Thielavia australiensis, Thielavia hyrcaniae and Neurospora crassa and wherein the optional second enzyme class is a superoxide dismutase of fungal origin, wherein the superoxide dismutase is obtained from, obtainable from, or derivable from a source selected from the group consisting of Trichoderma reesei, Aspergillus versicolor, Aspergillus deflectus, Aspergillus egyptiacus, Westerdykella sp. AS85-2, Aspergillus sp. XZ2669, Preussia terricola, Kionochaeta sp., Metapochonia bulbillosa, Xylomelasma sp. XZ0718, Preussia flanaganii, Cladobotryum sp., Westerdykella sp-46156, Trichoderma hamatum, Mycothermus thermophilus, Cephalotrichiella penicillate, Chaetomium megalocarpum, Chaetomium thermophilum var. thermophilum, Humicola hyalothermophila, Subramaniula anamorphosa, Sphingobacterium sp. T2, Trichoderma rossicum, Trichoderma lixii, Trichoderma sp-54723, Aspergillus niveus, Aspergillus templicola, Pochonia chlamydosporia var. spinulospora, Trichoderma sp-44174, Trichoderma rossicum, Trichoderma sp-54723, Trichoderma sp-44174, Metapochonia suchlasporia, Metarhizium marquandii, Diaporthe nobilis, Tolypocladium sp. XZ2627, Aspergillus japonicus, Metarhizium sp. XZ2431, Armillaria ostoyae, Trichoderma spirale, Aspergillus elegans, Trichoderma sinuosum, Trichoderma virens, Trichoderma harzianum, Fusicolla acetilerea, Plectosphaerella sp. 1-29, Mariannaea punicea, Penicillium oxalicum, Colletotrichum sp-71086, Aspergillus sp. nov. XZ3202, Trichoderma parapiluliferum, Aspergillus sp. nov. XZ3202, Mucor sp. XZ2651, Rhizomucor miehei, Mucor sp. XZ2651, Amphisphaeriaceae-sp 43674, Humicola fuscoatra and Valsaria rubricosa.

[1065] In a preferred embodiment, the method of the invention and the animal feed additive of the invention comprise a polypeptide having catalase activity wherein the polypeptide having catalase activity is selected from the group consisting of:
[1066] a. a polypeptide with catalase activity having at least 80%, at least 85%, at least 86%, at least 87%, at least 88%, at least 89%, at least 90%, at least 91%, at least 92%, at least 93%, at least 94%, at least 95%, at least 96%, at least 97%, at least 98%, at least 99%, or 100% sequence identity to SEQ ID NO: 6; and
[1067] b. a polypeptide with catalase activity having at least 80%, at least 85%, at least 86%, at least 87%, at least 88%, at least 89%, at least 90%, at least 91%, at least 92%, at least 93%, at least 94%, at least 95%, at least 96%, at least 97%, at least 98%, at least 99%, or 100% sequence identity to SEQ ID NO: 7
[1068] c. a polypeptide with catalase activity having at least 80%, at least 85%, at least 86%, at least 87%, at least 88%, at least 89%, at least 90%, at least 91%, at least 92%, at least 93%, at least 94%, at least 95%, at least 96%, at least 97%, at least 98%, at least 99%, or 100% sequence identity to SEQ ID NO: 103
[1069] d. a polypeptide with catalase activity having at least 80%, at least 85%, at least 86%, at least 87%, at least 88%, at least 89%, at least 90%, at least 91%, at least 92%, at least 93%, at least 94%, at least 95%, at least 96%, at least 97%, at least 98%, at least 99%, or 100% sequence identity to SEQ ID NO: 104;
[1070] e. a polypeptide with catalase activity having at least 80%, at least 85%, at least 86%, at least 87%, at least 88%, at least 89%, at least 90%, at least 91%, at least 92%, at least 93%, at least 94%, at least 95%, at least 96%, at least 97%, at least 98%, at least 99%, or 100% sequence identity to SEQ ID NO: 105;
[1071] f. a polypeptide with catalase activity having at least 80%, at least 85%, at least 86%, at least 87%, at least 88%, at least 89%, at least 90%, at least 91%, at least 92%, at least 93%, at least 94%, at least 95%, at least 96%, at least 97%, at least 98%, at least 99%, or 100% sequence identity to SEQ ID NO: 106;
[1072] g. a polypeptide with catalase activity having at least 80%, at least 85%, at least 86%, at least 87%, at least 88%, at least 89%, at least 90%, at least 91%, at least 92%, at least 93%, at least 94%, at least 95%, at least 96%, at least 97%, at least 98%, at least 99%, or 100% sequence identity to SEQ ID NO: 107;
[1073] h. a polypeptide with catalase activity having at least 80%, at least 85%, at least 86%, at least 87%, at least 88%, at least 89%, at least 90%, at least 91%, at least 92%, at least 93%, at least 94%, at least 95%, at least 96%, at least 97%, at least 98%, at least 99%, or 100% sequence identity to SEQ ID NO: 108;
[1074] i. a polypeptide with catalase activity having at least 80%, at least 85%, at least 86%, at least 87%, at least 88%, at least 89%, at least 90%, at least 91%, at least 92%, at least 93%, at least 94%, at least 95%, at least 96%, at least 97%, at least 98%, at least 99%, or 100% sequence identity to SEQ ID NO: 109
[1075] j. a polypeptide with catalase activity having at least 80%, at least 85%, at least 86%, at least 87%, at least 88%, at least 89%, at least 90%, at least 91%, at least 92%, at least 93%, at least 94%, at least 95%, at least 96%, at least 97%, at least 98%, at least 99%, or 100% sequence identity to SEQ ID NO: 110
[1076] k. a polypeptide with catalase activity having at least 80%, at least 85%, at least 86%, at least 87%, at least 88%, at least 89%, at least 90%, at least 91%, at least 92%, at least 93%, at least 94%, at least 95%, at least 96%, at least 97%, at least 98%, at least 99%, or 100% sequence identity to SEQ ID NO: 111
[1077] l. a polypeptide with catalase activity having at least 80%, at least 85%, at least 86%, at least 87%, at least 88%, at least 89%, at least 90%, at least 91%, at least 92%, at least 93%, at least 94%, at least 95%, at least 96%, at least 97%, at least 98%, at least 99%, or 100% sequence identity to SEQ ID NO: 112
[1078] m. a polypeptide with catalase activity having at least 80%, at least 85%, at least 86%, at least 87%, at least 88%, at least 89%, at least 90%, at least 91%, at least 92%, at least 93%, at least 94%, at least 95%, at least 96%, at least 97%, at least 98%, at least 99%, or 100% sequence identity to SEQ ID NO: 113
[1079] n. a polypeptide with catalase activity having at least 80%, at least 85%, at least 86%, at least 87%, at least 88%, at least 89%, at least 90%, at least 91%, at least 92%, at least 93%, at least 94%, at least 95%, at least 96%, at least 97%, at least 98%, at least 99%, or 100% sequence identity to SEQ ID NO: 114
[1080] o. a polypeptide with catalase activity having at least 80%, at least 85%, at least 86%, at least 87%, at least 88%, at least 89%, at least 90%, at least 91%, at least 92%, at least 93%, at least 94%, at least 95%, at least 96%, at least 97%, at least 98%, at least 99%, or 100% sequence identity to SEQ ID NO: 115
[1081] p. a polypeptide with catalase activity having at least 80%, at least 85%, at least 86%, at least 87%, at least 88%, at least 89%, at least 90%, at least 91%, at least 92%, at least 93%, at least 94%, at least 95%, at least 96%, at least 97%, at least 98%, at least 99%, or 100% sequence identity to SEQ ID NO: 116
[1082] q. a polypeptide with catalase activity having at least 80%, at least 85%, at least 86%, at least 87%, at least 88%, at least 89%, at least 90%, at least 91%, at least 92%, at least 93%, at least 94%, at least 95%, at least 96%, at least 97%, at least 98%, at least 99%, or 100% sequence identity to SEQ ID NO: 117
[1083] r. a polypeptide with catalase activity having at least 80%, at least 85%, at least 86%, at least 87%, at least 88%, at least 89%, at least 90%, at least 91%, at least 92%, at least 93%, at least 94%, at least 95%, at least 96%, at least 97%, at least 98%, at least 99%, or 100% sequence identity to SEQ ID NO: 118
[1084] s. a polypeptide with catalase activity having at least 80%, at least 85%, at least 86%, at least 87%, at least 88%, at least 89%, at least 90%, at least 91%, at least 92%, at least 93%, at least 94%, at least 95%, at least 96%, at least 97%, at least 98%, at least 99%, or 100% sequence identity to SEQ ID NO: 119
[1085] t. a polypeptide with catalase activity having at least 80%, at least 85%, at least 86%, at least 87%, at least 88%, at least 89%, at least 90%, at least 91%, at least 92%, at least 93%, at least 94%, at least 95%, at least 96%, at least 97%, at least 98%, at least 99%, or 100% sequence identity to SEQ ID NO: 120
[1086] u. a polypeptide with catalase activity having at least 80%, at least 85%, at least 86%, at least 87%, at least 88%, at least 89%, at least 90%, at least 91%, at least 92%, at least 93%, at least 94%, at least 95%, at least 96%, at least 97%, at least 98%, at least 99%, or 100% sequence identity to SEQ ID NO: 121
[1087] v. a polypeptide with catalase activity having at least 80%, at least 85%, at least 86%, at least 87%, at least 88%, at least 89%, at least 90%, at least 91%, at least 92%, at least 93%, at least 94%, at least 95%, at least 96%, at least 97%, at least 98%, at least 99%, or 100% sequence identity to SEQ ID NO: 122
[1088] w. a polypeptide with catalase activity having at least 80%, at least 85%, at least 86%, at least 87%, at least 88%, at least 89%, at least 90%, at least 91%, at least 92%, at least 93%, at least 94%, at least 95%, at least 96%, at least 97%, at least 98%, at least 99%, or 100% sequence identity to SEQ ID NO: 123
[1089] x. a polypeptide with catalase activity having at least 80%, at least 85%, at least 86%, at least 87%, at least 88%, at least 89%, at least 90%, at least 91%, at least 92%, at least 93%, at least 94%, at least 95%, at least 96%, at least 97%, at least 98%, at least 99%, or 100% sequence identity to SEQ ID NO: 124
[1090] y. a polypeptide with catalase activity having at least 80%, at least 85%, at least 86%, at least 87%, at least 88%, at least 89%, at least 90%, at least 91%, at least 92%, at least 93%, at least 94%, at least 95%, at least 96%, at least 97%, at least 98%, at least 99%, or 100% sequence identity to SEQ ID NO: 125
[1091] z. a polypeptide with catalase activity having at least 80%, at least 85%, at least 86%, at least 87%, at least 88%, at least 89%, at least 90%, at least 91%, at least 92%, at least 93%, at least 94%, at least 95%, at least 96%, at least 97%, at least 98%, at least 99%, or 100% sequence identity to SEQ ID NO: 126;
[1092] aa. a polypeptide with catalase activity having at least 80%, at least 85%, at least 86%, at least 87%, at least 88%, at least 89%, at least 90%, at least 91%, at least 92%, at least 93%, at least 94%, at least 95%, at least 96%, at least 97%, at least 98%, at least 99%, or 100% sequence identity to SEQ ID NO: 250;
[1093] bb. a polypeptide with catalase activity having at least 80%, at least 85%, at least 86%, at least 87%, at least 88%, at least 89%, at least 90%, at least 91%, at least 92%, at least 93%, at least 94%, at least 95%, at least 96%, at least 97%, at least 98%, at least 99%, or 100% sequence identity to SEQ ID NO 151;
[1094] cc. a polypeptide with catalase activity having at least 80%, at least 85%, at least 86%, at least 87%, at least 88%, at least 89%, at least 90%, at least 91%, at least 92%, at least 93%, at least 94%, at least 95%, at least 96%, at least 97%, at least 98%, at least 99%, or 100% sequence identity to SEQ ID NO 152;
[1095] dd. a polypeptide with catalase activity having at least 80%, at least 85%, at least 86%, at least 87%, at least 88%, at least 89%, at least 90%, at least 91%, at least 92%, at least 93%, at least 94%, at least 95%, at least 96%, at least 97%, at least 98%, at least 99%, or 100% sequence identity to SEQ ID NO 153;
[1096] ee. a polypeptide with catalase activity having at least 80%, at least 85%, at least 86%, at least 87%, at least 88%, at least 89%, at least 90%, at least 91%, at least 92%, at least 93%, at least 94%, at least 95%, at least 96%, at least 97%, at least 98%, at least 99%, or 100% sequence identity to SEQ ID NO 154;
[1097] ff. a polypeptide with catalase activity having at least 80%, at least 85%, at least 86%, at least 87%, at least 88%, at least 89%, at least 90%, at least 91%, at least 92%, at least 93%, at least 94%, at least 95%, at least 96%, at least 97%, at least 98%, at least 99%, or 100% sequence identity to SEQ ID NO 155;
[1098] gg. a polypeptide with catalase activity having at least 80%, at least 85%, at least 86%, at least 87%, at least 88%, at least 89%, at least 90%, at least 91%, at least 92%, at least 93%, at least 94%, at least 95%, at least 96%, at least 97%, at least 98%, at least 99%, or 100% sequence identity to SEQ ID NO 156;
[1099] hh. a polypeptide with catalase activity having at least 80%, at least 85%, at least 86%, at least 87%, at least 88%, at least 89%, at least 90%, at least 91%, at least 92%, at least 93%, at least 94%, at least 95%, at least 96%, at least 97%, at least 98%, at least 99%, or 100% sequence identity to SEQ ID NO 157;
[1100] ii. a polypeptide with catalase activity having at least 80%, at least 85%, at least 86%, at least 87%, at least 88%, at least 89%, at least 90%, at least 91%, at least 92%, at least 93%, at least 94%, at least 95%, at least 96%, at least 97%, at least 98%, at least 99%, or 100% sequence identity to SEQ ID NO 158;
[1101] jj. a polypeptide with catalase activity having at least 80%, at least 85%, at least 86%, at least 87%, at least 88%, at least 89%, at least 90%, at least 91%, at least 92%, at least 93%, at least 94%, at least 95%, at least 96%, at least 97%, at least 98%, at least 99%, or 100% sequence identity to SEQ ID NO 159;
[1102] kk. a polypeptide with catalase activity having at least 80%, at least 85%, at least 86%, at least 87%, at least 88%, at least 89%, at least 90%, at least 91%, at least 92%, at least 93%, at least 94%, at least 95%, at least 96%, at least 97%, at least 98%, at least 99%, or 100% sequence identity to SEQ ID NO 160;
[1103] ll. a polypeptide with catalase activity having at least 80%, at least 85%, at least 86%, at least 87%, at least 88%, at least 89%, at least 90%, at least 91%, at least 92%, at least 93%, at least 94%, at least 95%, at least 96%, at least 97%, at least 98%, at least 99%, or 100% sequence identity to SEQ ID NO 161;
[1104] mm. a polypeptide with catalase activity having at least 80%, at least 85%, at least 86%, at least 87%, at least 88%, at least 89%, at least 90%, at least 91%, at least 92%, at least 93%, at least 94%, at least 95%, at least 96%, at least 97%, at least 98%, at least 99%, or 100% sequence identity to SEQ ID NO 162;
[1105] nn. a polypeptide with catalase activity having at least 80%, at least 85%, at least 86%, at least 87%, at least 88%, at least 89%, at least 90%, at least 91%, at least 92%, at least 93%, at least 94%, at least 95%, at least 96%, at least 97%, at least 98%, at least 99%, or 100% sequence identity to SEQ ID NO 163;
[1106] oo. a polypeptide with catalase activity having at least 80%, at least 85%, at least 86%, at least 87%, at least 88%, at least 89%, at least 90%, at least 91%, at least 92%, at least 93%, at least 94%, at least 95%, at least 96%, at least 97%, at least 98%, at least 99%, or 100% sequence identity to SEQ ID NO 164;
[1107] pp. a polypeptide with catalase activity having at least 80%, at least 85%, at least 86%, at least 87%, at least 88%, at least 89%, at least 90%, at least 91%, at least 92%, at least 93%, at least 94%, at least 95%, at least 96%, at least 97%, at least 98%, at least 99%, or 100% sequence identity to SEQ ID NO 165;
[1108] qq. a polypeptide with catalase activity having at least 80%, at least 85%, at least 86%, at least 87%, at least 88%, at least 89%, at least 90%, at least 91%, at least 92%, at least 93%, at least 94%, at least 95%, at least 96%, at least 97%, at least 98%, at least 99%, or 100% sequence identity to SEQ ID NO 166;
[1109] rr. a polypeptide with catalase activity having at least 80%, at least 85%, at least 86%, at least 87%, at least 88%, at least 89%, at least 90%, at least 91%, at least 92%, at least 93%, at least 94%, at least 95%, at least 96%, at least 97%, at least 98%, at least 99%, or 100% sequence identity to SEQ ID NO 167;
[1110] ss. a polypeptide with catalase activity having at least 80%, at least 85%, at least 86%, at least 87%, at least 88%, at least 89%, at least 90%, at least 91%, at least 92%, at least 93%, at least 94%, at least 95%, at least 96%, at least 97%, at least 98%, at least 99%, or 100% sequence identity to SEQ ID NO 168;
[1111] tt. a polypeptide with catalase activity having at least 80%, at least 85%, at least 86%, at least 87%, at least 88%, at least 89%, at least 90%, at least 91%, at least 92%, at least 93%, at least 94%, at least 95%, at least 96%, at least 97%, at least 98%, at least 99%, or 100% sequence identity to SEQ ID NO 169;
[1112] uu. a polypeptide with catalase activity having at least 80%, at least 85%, at least 86%, at least 87%, at least 88%, at least 89%, at least 90%, at least 91%, at least 92%, at least 93%, at least 94%, at least 95%, at least 96%, at least 97%, at least 98%, at least 99%, or 100% sequence identity to SEQ ID NO 170;
[1113] vv. a polypeptide with catalase activity having at least 80%, at least 85%, at least 86%, at least 87%, at least 88%, at least 89%, at least 90%, at least 91%, at least 92%, at least 93%, at least 94%, at least 95%, at least 96%, at least 97%, at least 98%, at least 99%, or 100% sequence identity to SEQ ID NO 171;
[1114] ww. a polypeptide with catalase activity having at least 80%, at least 85%, at least 86%, at least 87%, at least 88%, at least 89%, at least 90%, at least 91%, at least 92%, at least 93%, at least 94%, at least 95%, at least 96%, at least 97%, at least 98%, at least 99%, or 100% sequence identity to SEQ ID NO 172;
[1115] xx. a polypeptide with catalase activity having at least 80%, at least 85%, at least 86%, at least 87%, at least 88%, at least 89%, at least 90%, at least 91%, at least 92%, at least 93%, at least 94%, at least 95%, at least 96%, at least 97%, at least 98%, at least 99%, or 100% sequence identity to SEQ ID NO 173;
[1116] yy. a polypeptide with catalase activity having at least 80%, at least 85%, at least 86%, at least 87%, at least 88%, at least 89%, at least 90%, at least 91%, at least 92%, at least 93%, at least 94%, at least 95%, at least 96%, at least 97%, at least 98%, at least 99%, or 100% sequence identity to SEQ ID NO 174;
[1117] zz. a polypeptide with catalase activity having at least 80%, at least 85%, at least 86%, at least 87%, at least 88%, at least 89%, at least 90%, at least 91%, at least 92%, at least 93%, at least 94%, at least 95%, at least 96%, at least 97%, at least 98%, at least 99%, or 100% sequence identity to SEQ ID NO 250; and
[1118] aaa. a polypeptide with catalase activity having at least 80%, at least 85%, at least 86%, at least 87%, at least 88%, at least 89%, at least 90%, at least 91%, at least 92%, at least 93%, at least 94%, at least 95%, at least 96%, at least 97%, at least 98%, at least 99%, or 100% sequence identity to SEQ ID NO 251.

[1119] In a preferred embodiment, wherein the animal feed additive comprises a polypeptide of fungal origin having catalase activity and a superoxide dismutase of fungal origin wherein the polypeptide having catalase activity is selected from the group consisting of:
[1120] a. a polypeptide with catalase activity having at least 80%, at least 85%, at least 86%, at least 87%, at least 88%, at least 89%, at least 90%, at least 91%, at least 92%, at least 93%, at least 94%, at least 95%, at least 96%, at least 97%, at least 98%, at least 99%, or 100% sequence identity to SEQ ID NO: 6; and
[1121] b. a polypeptide with catalase activity having at least 80%, at least 85%, at least 86%, at least 87%, at least 88%, at least 89%, at least 90%, at least 91%, at least 92%, at least 93%, at least 94%, at least 95%, at least 96%, at least 97%, at least 98%, at least 99%, or 100% sequence identity to SEQ ID NO: 7
[1122] c. a polypeptide with catalase activity having at least 80%, at least 85%, at least 86%, at least 87%, at least 88%, at least 89%, at least 90%, at least 91%, at least 92%, at least 93%, at least 94%, at least 95%, at least 96%, at least 97%, at least 98%, at least 99%, or 100% sequence identity to SEQ ID NO: 103
[1123] d. a polypeptide with catalase activity having at least 80%, at least 85%, at least 86%, at least 87%, at least 88%, at least 89%, at least 90%, at least 91%, at least 92%, at least 93%, at least 94%, at least 95%, at least 96%, at least 97%, at least 98%, at least 99%, or 100% sequence identity to SEQ ID NO: 104;
[1124] e. a polypeptide with catalase activity having at least 80%, at least 85%, at least 86%, at least 87%, at least 88%, at least 89%, at least 90%, at least 91%, at least 92%, at least 93%, at least 94%, at least 95%, at least 96%, at least 97%, at least 98%, at least 99%, or 100% sequence identity to SEQ ID NO: 105;
[1125] f. a polypeptide with catalase activity having at least 80%, at least 85%, at least 86%, at least 87%, at least 88%, at least 89%, at least 90%, at least 91%, at least 92%, at least 93%, at least 94%, at least 95%, at least 96%, at least 97%, at least 98%, at least 99%, or 100% sequence identity to SEQ ID NO: 106;
[1126] g. a polypeptide with catalase activity having at least 80%, at least 85%, at least 86%, at least 87%, at least 88%, at least 89%, at least 90%, at least 91%, at least 92%, at least 93%, at least 94%, at least 95%, at least 96%, at least 97%, at least 98%, at least 99%, or 100% sequence identity to SEQ ID NO: 107;
[1127] h. a polypeptide with catalase activity having at least 80%, at least 85%, at least 86%, at least 87%, at least 88%, at least 89%, at least 90%, at least 91%, at least 92%, at least 93%, at least 94%, at least 95%, at least 96%, at least 97%, at least 98%, at least 99%, or 100% sequence identity to SEQ ID NO: 108;
[1128] i. a polypeptide with catalase activity having at least 80%, at least 85%, at least 86%, at least 87%, at least 88%, at least 89%, at least 90%, at least 91%, at least 92%, at least 93%, at least 94%, at least 95%, at least 96%, at least 97%, at least 98%, at least 99%, or 100% sequence identity to SEQ ID NO: 109
[1129] j. a polypeptide with catalase activity having at least 80%, at least 85%, at least 86%, at least 87%, at least 88%, at least 89%, at least 90%, at least 91%, at least 92%, at least 93%, at least 94%, at least 95%, at least 96%, at least 97%, at least 98%, at least 99%, or 100% sequence identity to SEQ ID NO: 110
[1130] k. a polypeptide with catalase activity having at least 80%, at least 85%, at least 86%, at least 87%, at least 88%, at least 89%, at least 90%, at least 91%, at least 92%, at least 93%, at least 94%, at least 95%, at least 96%, at least 97%, at least 98%, at least 99%, or 100% sequence identity to SEQ ID NO: 111
[1131] l. a polypeptide with catalase activity having at least 80%, at least 85%, at least 86%, at least 87%, at least 88%, at least 89%, at least 90%, at least 91%, at least 92%, at least 93%, at least 94%, at least 95%, at least 96%, at least 97%, at least 98%, at least 99%, or 100% sequence identity to SEQ ID NO: 112
[1132] m. a polypeptide with catalase activity having at least 80%, at least 85%, at least 86%, at least 87%, at least 88%, at least 89%, at least 90%, at least 91%, at least 92%, at least 93%, at least 94%, at least 95%, at least 96%, at least 97%, at least 98%, at least 99%, or 100% sequence identity to SEQ ID NO: 113
[1133] n. a polypeptide with catalase activity having at least 80%, at least 85%, at least 86%, at least 87%, at least 88%, at least 89%, at least 90%, at least 91%, at least 92%, at least 93%, at least 94%, at least 95%, at least 96%, at least 97%, at least 98%, at least 99%, or 100% sequence identity to SEQ ID NO: 114
[1134] o. a polypeptide with catalase activity having at least 80%, at least 85%, at least 86%, at least 87%, at least 88%, at least 89%, at least 90%, at least 91%, at least 92%, at least 93%, at least 94%, at least 95%, at least 96%, at least 97%, at least 98%, at least 99%, or 100% sequence identity to SEQ ID NO: 115
[1135] p. a polypeptide with catalase activity having at least 80%, at least 85%, at least 86%, at least 87%, at least 88%, at least 89%, at least 90%, at least 91%, at least 92%, at least 93%, at least 94%, at least 95%, at least 96%, at least 97%, at least 98%, at least 99%, or 100% sequence identity to SEQ ID NO: 116
[1136] q. a polypeptide with catalase activity having at least 80%, at least 85%, at least 86%, at least 87%, at least 88%, at least 89%, at least 90%, at least 91%, at least 92%, at least 93%, at least 94%, at least 95%, at least 96%, at least 97%, at least 98%, at least 99%, or 100% sequence identity to SEQ ID NO: 117
[1137] r. a polypeptide with catalase activity having at least 80%, at least 85%, at least 86%, at least 87%, at least 88%, at least 89%, at least 90%, at least 91%, at least 92%, at least 93%, at least 94%, at least 95%, at least 96%, at least 97%, at least 98%, at least 99%, or 100% sequence identity to SEQ ID NO: 118
[1138] s. a polypeptide with catalase activity having at least 80%, at least 85%, at least 86%, at least 87%, at least 88%, at least 89%, at least 90%, at least 91%, at least 92%, at least 93%, at least 94%, at least 95%, at least 96%, at least 97%, at least 98%, at least 99%, or 100% sequence identity to SEQ ID NO: 119
[1139] t. a polypeptide with catalase activity having at least 80%, at least 85%, at least 86%, at least 87%, at least 88%, at least 89%, at least 90%, at least 91%, at least 92%, at least 93%, at least 94%, at least 95%, at least 96%, at least 97%, at least 98%, at least 99%, or 100% sequence identity to SEQ ID NO: 120
[1140] u. a polypeptide with catalase activity having at least 80%, at least 85%, at least 86%, at least 87%, at least 88%, at least 89%, at least 90%, at least 91%, at least 92%, at least 93%, at least 94%, at least 95%, at least 96%, at least 97%, at least 98%, at least 99%, or 100% sequence identity to SEQ ID NO: 121
[1141] v. a polypeptide with catalase activity having at least 80%, at least 85%, at least 86%, at least 87%, at least 88%, at least 89%, at least 90%, at least 91%, at least 92%, at least 93%, at least 94%, at least 95%, at least 96%, at least 97%, at least 98%, at least 99%, or 100% sequence identity to SEQ ID NO: 122
[1142] w. a polypeptide with catalase activity having at least 80%, at least 85%, at least 86%, at least 87%, at least 88%, at least 89%, at least 90%, at least 91%, at least 92%, at least 93%, at least 94%, at least 95%, at least 96%, at least 97%, at least 98%, at least 99%, or 100% sequence identity to SEQ ID NO: 123
[1143] x. a polypeptide with catalase activity having at least 80%, at least 85%, at least 86%, at least 87%, at least 88%, at least 89%, at least 90%, at least 91%, at least 92%, at least 93%, at least 94%, at least 95%, at least 96%, at least 97%, at least 98%, at least 99%, or 100% sequence identity to SEQ ID NO: 124
[1144] y. a polypeptide with catalase activity having at least 80%, at least 85%, at least 86%, at least 87%, at least 88%, at least 89%, at least 90%, at least 91%, at least 92%, at least 93%, at least 94%, at least 95%, at least 96%, at least 97%, at least 98%, at least 99%, or 100% sequence identity to SEQ ID NO: 125
[1145] z. a polypeptide with catalase activity having at least 80%, at least 85%, at least 86%, at least 87%, at least 88%, at least 89%, at least 90%, at least 91%, at least 92%, at least 93%, at least 94%, at least 95%, at least 96%, at least 97%, at least 98%, at least 99%, or 100% sequence identity to SEQ ID NO: 126;
[1146] aa. a polypeptide with catalase activity having at least 80%, at least 85%, at least 86%, at least 87%, at least 88%, at least 89%, at least 90%, at least 91%, at least 92%, at least 93%, at least 94%, at least 95%, at least 96%, at least 97%, at least 98%, at least 99%, or 100% sequence identity to SEQ ID NO: 250;
[1147] bb. a polypeptide with catalase activity having at least 80%, at least 85%, at least 86%, at least 87%, at least 88%, at least 89%, at least 90%, at least 91%, at least 92%, at least 93%, at least 94%, at least 95%, at least 96%, at least 97%, at least 98%, at least 99%, or 100% sequence identity to SEQ ID NO 151;
[1148] cc. a polypeptide with catalase activity having at least 80%, at least 85%, at least 86%, at least 87%, at least 88%, at least 89%, at least 90%, at least 91%, at least 92%, at least 93%, at least 94%, at least 95%, at least 96%, at least 97%, at least 98%, at least 99%, or 100% sequence identity to SEQ ID NO 152;
[1149] dd. a polypeptide with catalase activity having at least 80%, at least 85%, at least 86%, at least 87%, at least 88%, at least 89%, at least 90%, at least 91%, at least 92%, at least 93%, at least 94%, at least 95%, at least 96%, at least 97%, at least 98%, at least 99%, or 100% sequence identity to SEQ ID NO 153;
[1150] ee. a polypeptide with catalase activity having at least 80%, at least 85%, at least 86%, at least 87%, at least 88%, at least 89%, at least 90%, at least 91%, at least 92%, at least 93%, at least 94%, at least 95%, at least 96%, at least 97%, at least 98%, at least 99%, or 100% sequence identity to SEQ ID NO 154;
[1151] ff. a polypeptide with catalase activity having at least 80%, at least 85%, at least 86%, at least 87%, at least 88%, at least 89%, at least 90%, at least 91%, at least 92%, at least 93%, at least 94%, at least 95%, at least 96%, at least 97%, at least 98%, at least 99%, or 100% sequence identity to SEQ ID NO 155;
[1152] gg. a polypeptide with catalase activity having at least 80%, at least 85%, at least 86%, at least 87%, at least 88%, at least 89%, at least 90%, at least 91%, at least 92%, at least 93%, at least 94%, at least 95%, at least 96%, at least 97%, at least 98%, at least 99%, or 100% sequence identity to SEQ ID NO 156;
[1153] hh. a polypeptide with catalase activity having at least 80%, at least 85%, at least 86%, at least 87%, at least 88%, at least 89%, at least 90%, at least 91%, at least 92%, at least 93%, at least 94%, at least 95%, at least 96%, at least 97%, at least 98%, at least 99%, or 100% sequence identity to SEQ ID NO 157;
[1154] ii. a polypeptide with catalase activity having at least 80%, at least 85%, at least 86%, at least 87%, at least 88%, at least 89%, at least 90%, at least 91%, at least 92%, at least 93%, at least 94%, at least 95%, at least 96%, at least 97%, at least 98%, at least 99%, or 100% sequence identity to SEQ ID NO 158;
[1155] jj. a polypeptide with catalase activity having at least 80%, at least 85%, at least 86%, at least 87%, at least 88%, at least 89%, at least 90%, at least 91%, at least 92%, at least 93%, at least 94%, at least 95%, at least 96%, at least 97%, at least 98%, at least 99%, or 100% sequence identity to SEQ ID NO 159;
[1156] kk. a polypeptide with catalase activity having at least 80%, at least 85%, at least 86%, at least 87%, at least 88%, at least 89%, at least 90%, at least 91%, at least 92%, at least 93%, at least 94%, at least 95%, at least 96%, at least 97%, at least 98%, at least 99%, or 100% sequence identity to SEQ ID NO 160;
[1157] ll. a polypeptide with catalase activity having at least 80%, at least 85%, at least 86%, at least 87%, at least 88%, at least 89%, at least 90%, at least 91%, at least 92%, at least 93%, at least 94%, at least 95%, at least 96%, at least 97%, at least 98%, at least 99%, or 100% sequence identity to SEQ ID NO 161;
[1158] mm. a polypeptide with catalase activity having at least 80%, at least 85%, at least 86%, at least 87%, at least 88%, at least 89%, at least 90%, at least 91%, at least 92%, at least 93%, at least 94%, at least 95%, at least 96%, at least 97%, at least 98%, at least 99%, or 100% sequence identity to SEQ ID NO 162;
[1159] nn. a polypeptide with catalase activity having at least 80%, at least 85%, at least 86%, at least 87%, at least 88%, at least 89%, at least 90%, at least 91%, at least 92%, at least 93%, at least 94%, at least 95%, at least 96%, at least 97%, at least 98%, at least 99%, or 100% sequence identity to SEQ ID NO 163;
[1160] oo. a polypeptide with catalase activity having at least 80%, at least 85%, at least 86%, at least 87%, at least 88%, at least 89%, at least 90%, at least 91%, at least 92%, at least 93%, at least 94%, at least 95%, at least 96%, at least 97%, at least 98%, at least 99%, or 100% sequence identity to SEQ ID NO 164;
[1161] pp. a polypeptide with catalase activity having at least 80%, at least 85%, at least 86%, at least 87%, at least 88%, at least 89%, at least 90%, at least 91%, at least 92%, at least 93%, at least 94%, at least 95%, at least 96%, at least 97%, at least 98%, at least 99%, or 100% sequence identity to SEQ ID NO 165;
[1162] qq. a polypeptide with catalase activity having at least 80%, at least 85%, at least 86%, at least 87%, at least 88%, at least 89%, at least 90%, at least 91%, at least 92%, at least 93%, at least 94%, at least 95%, at least 96%, at least 97%, at least 98%, at least 99%, or 100% sequence identity to SEQ ID NO 166;
[1163] rr. a polypeptide with catalase activity having at least 80%, at least 85%, at least 86%, at least 87%, at least 88%, at least 89%, at least 90%, at least 91%, at least 92%, at least 93%, at least 94%, at least 95%, at least 96%, at least 97%, at least 98%, at least 99%, or 100% sequence identity to SEQ ID NO 167;
[1164] ss. a polypeptide with catalase activity having at least 80%, at least 85%, at least 86%, at least 87%, at least 88%, at least 89%, at least 90%, at least 91%, at least 92%, at least 93%, at least 94%, at least 95%, at least 96%, at least 97%, at least 98%, at least 99%, or 100% sequence identity to SEQ ID NO 168;
[1165] tt. a polypeptide with catalase activity having at least 80%, at least 85%, at least 86%, at least 87%, at least 88%, at least 89%, at least 90%, at least 91%, at least 92%, at least 93%, at least 94%, at least 95%, at least 96%, at least 97%, at least 98%, at least 99%, or 100% sequence identity to SEQ ID NO 169;
[1166] uu. a polypeptide with catalase activity having at least 80%, at least 85%, at least 86%, at least 87%, at least 88%, at least 89%, at least 90%, at least 91%, at least 92%, at least 93%, at least 94%, at least 95%, at least 96%, at least 97%, at least 98%, at least 99%, or 100% sequence identity to SEQ ID NO 170;
[1167] vv. a polypeptide with catalase activity having at least 80%, at least 85%, at least 86%, at least 87%, at least 88%, at least 89%, at least 90%, at least 91%, at least 92%, at least 93%, at least 94%, at least 95%, at least 96%, at least 97%, at least 98%, at least 99%, or 100% sequence identity to SEQ ID NO 171;
[1168] ww. a polypeptide with catalase activity having at least 80%, at least 85%, at least 86%, at least 87%, at least 88%, at least 89%, at least 90%, at least 91%, at least 92%, at least 93%, at least 94%, at least 95%, at least 96%, at least 97%, at least 98%, at least 99%, or 100% sequence identity to SEQ ID NO 172;
[1169] xx. a polypeptide with catalase activity having at least 80%, at least 85%, at least 86%, at least 87%, at least 88%, at least 89%, at least 90%, at least 91%, at least 92%, at least 93%, at least 94%, at least 95%, at least 96%, at least 97%, at least 98%, at least 99%, or 100% sequence identity to SEQ ID NO 173;
[1170] yy. a polypeptide with catalase activity having at least 80%, at least 85%, at least 86%, at least 87%, at least 88%, at least 89%, at least 90%, at least 91%, at least 92%, at least 93%, at least 94%, at least 95%, at least 96%, at least 97%, at least 98%, at least 99%, or 100% sequence identity to SEQ ID NO 174;
[1171] zz. a polypeptide with catalase activity having at least 80%, at least 85%, at least 86%, at least 87%, at least 88%, at least 89%, at least 90%, at least 91%, at least 92%, at least 93%, at least 94%, at least 95%, at least 96%, at least 97%, at least 98%, at least 99%, or 100% sequence identity to SEQ ID NO 250; and
[1172] aaa. a polypeptide with catalase activity having at least 80%, at least 85%, at least 86%, at least 87%, at least 88%, at least 89%, at least 90%, at least 91%, at least 92%, at least 93%, at least 94%, at least 95%, at least 96%, at least 97%, at least 98%, at least 99%, or 100% sequence identity to SEQ ID NO 251, and
[1173] wherein the polypeptide having superoxide dismutase activity is selected from the group consisting of:
[1174] a. a polypeptide having at least 75%, at least 80%, at least 85%, at least 86%, at least 87%, at least 88%, at least 89%, at least 90%, at least 91%, at least 92%, at least 93%, at least 94%, at least 95%, at least 96%, at least 97%, at least 98%, at least 99%, or 100% sequence identity to SEQ ID NO: 1;
[1175] b. a polypeptide having at least 75%, at least 80%, at least 85%, at least 86%, at least 87%, at least 88%, at least 89%, at least 90%, at least 91%, at least 92%, at least 93%, at least 94%, at least 95%, at least 96%, at least 97%, at least 98%, at least 99%, or 100% sequence identity to SEQ ID NO: 2;
[1176] c. a polypeptide having at least 75%, at least 80%, at least 85%, at least 86%, at least 87%, at least 88%, at least 89%, at least 90%, at least 91%, at least 92%, at least 93%, at least 94%, at least 95%, at least 96%, at least 97%, at least 98%, at least 99%, or 100% sequence identity to SEQ ID NO: 3;
[1177] d. a polypeptide having at least 75%, at least 80%, at least 85%, at least 86%, at least 87%, at least 88%, at least 89%, at least 90%, at least 91%, at least 92%, at least 93%, at least 94%, at least 95%, at least 96%, at least 97%, at least 98%, at least 99%, or 100% sequence identity to SEQ ID NO: 4;
[1178] e. a polypeptide having at least 75%, at least 80%, at least 85%, at least 86%, at least 87%, at least 88%, at least 89%, at least 90%, at least 91%, at least 92%, at least 93%, at least 94%, at least 95%, at least 96%, at least 97%, at least 98%, at least 99%, or 100% sequence identity to SEQ ID NO: 9;
[1179] f. a polypeptide having at least 75%, at least 80%, at least 85%, at least 86%, at least 87%, at least 88%, at least 89%, at least 90%, at least 91%, at least 92%, at least 93%, at least 94%, at least 95%, at least 96%, at least 97%, at least 98%, at least 99%, or 100% sequence identity to SEQ ID NO: 10;
[1180] g. a polypeptide having at least 75%, at least 80%, at least 85%, at least 86%, at least 87%, at least 88%, at least 89%, at least 90%, at least 91%, at least 92%, at least 93%, at least 94%, at least 95%, at least 96%, at least 97%, at least 98%, at least 99%, or 100% sequence identity to SEQ ID NO: 11;
[1181] h. a polypeptide having at least 75%, at least 80%, at least 85%, at least 86%, at least 87%, at least 88%, at least 89%, at least 90%, at least 91%, at least 92%, at least 93%, at least 94%, at least 95%, at least 96%, at least 97%, at least 98%, at least 99%, or 100% sequence identity to SEQ ID NO: 12;
[1182] i. a polypeptide having at least 75%, at least 80%, at least 85%, at least 86%, at least 87%, at least 88%, at least 89%, at least 90%, at least 91%, at least 92%, at least 93%, at least 94%, at least 95%, at least 96%, at least 97%, at least 98%, at least 99%, or 100% sequence identity to SEQ ID NO: 13;
[1183] j. a polypeptide having at least 75%, at least 80%, at least 85%, at least 86%, at least 87%, at least 88%, at least 89%, at least 90%, at least 91%, at least 92%, at least 93%, at least 94%, at least 95%, at least 96%, at least 97%, at least 98%, at least 99%, or 100% sequence identity to SEQ ID NO: 14;
[1184] k. a polypeptide having at least 75%, at least 80%, at least 85%, at least 86%, at least 87%, at least 88%, at least 89%, at least 90%, at least 91%, at least 92%, at least 93%, at least 94%, at least 95%, at least 96%, at least 97%, at least 98%, at least 99%, or 100% sequence identity to SEQ ID NO: 15;
[1185] l. a polypeptide having at least 75%, at least 80%, at least 85%, at least 86%, at least 87%, at least 88%, at least 89%, at least 90%, at least 91%, at least 92%, at least 93%, at least 94%, at least 95%, at least 96%, at least 97%, at least 98%, at least 99%, or 100% sequence identity to SEQ ID NO: 16;
[1186] m. a polypeptide having at least 75%, at least 80%, at least 85%, at least 86%, at least 87%, at least 88%, at least 89%, at least 90%, at least 91%, at least 92%, at least 93%, at least 94%, at least 95%, at least 96%, at least 97%, at least 98%, at least 99%, or 100% sequence identity to SEQ ID NO: 17;
[1187] n. a polypeptide having at least 75%, at least 80%, at least 85%, at least 86%, at least 87%, at least 88%, at least 89%, at least 90%, at least 91%, at least 92%, at least 93%, at least 94%, at least 95%, at least 96%, at least 97%, at least 98%, at least 99%, or 100% sequence identity to SEQ ID NO: 19;
[1188] o. a polypeptide having at least 75%, at least 80%, at least 85%, at least 86%, at least 87%, at least 88%, at least 89%, at least 90%, at least 91%, at least 92%, at least 93%, at least 94%, at least 95%, at least 96%, at least 97%, at least 98%, at least 99%, or 100% sequence identity to SEQ ID NO: 20;
[1189] p. a polypeptide having at least 75%, at least 80%, at least 85%, at least 86%, at least 87%, at least 88%, at least 89%, at least 90%, at least 91%, at least 92%, at least 93%, at least 94%, at least 95%, at least 96%, at least 97%, at least 98%, at least 99%, or 100% sequence identity to SEQ ID NO: 21;
[1190] q. a polypeptide having at least 75%, at least 80%, at least 85%, at least 86%, at least 87%, at least 88%, at least 89%, at least 90%, at least 91%, at least 92%, at least 93%, at least 94%, at least 95%, at least 96%, at least 97%, at least 98%, at least 99%, or 100% sequence identity to SEQ ID NO: 22;
[1191] r. a polypeptide having at least 75%, at least 80%, at least 85%, at least 86%, at least 87%, at least 88%, at least 89%, at least 90%, at least 91%, at least 92%, at least 93%, at least 94%, at least 95%, at least 96%, at least 97%, at least 98%, at least 99%, or 100% sequence identity to SEQ ID NO: 23;
[1192] s. a polypeptide having at least 75%, at least 80%, at least 85%, at least 86%, at least 87%, at least 88%, at least 89%, at least 90%, at least 91%, at least 92%, at least 93%, at least 94%, at least 95%, at least 96%, at least 97%, at least 98%, at least 99%, or 100% sequence identity to SEQ ID NO: 24;
[1193] t. a polypeptide having at least 75%, at least 80%, at least 85%, at least 86%, at least 87%, at least 88%, at least 89%, at least 90%, at least 91%, at least 92%, at least 93%, at least 94%, at least 95%, at least 96%, at least 97%, at least 98%, at least 99%, or 100% sequence identity to SEQ ID NO: 25;
[1194] u. a polypeptide having at least 75%, at least 80%, at least 85%, at least 86%, at least 87%, at least 88%, at least 89%, at least 90%, at least 91%, at least 92%, at least 93%, at least 94%, at least 95%, at least 96%, at least 97%, at least 98%, at least 99%, or 100% sequence identity to SEQ ID NO: 26;
[1195] v. a polypeptide having at least 75%, at least 80%, at least 85%, at least 86%, at least 87%, at least 88%, at least 89%, at least 90%, at least 91%, at least 92%, at least 93%, at least 94%, at least 95%, at least 96%, at least 97%, at least 98%, at least 99%, or 100% sequence identity to SEQ ID NO: 27;
[1196] w. a polypeptide having at least 75%, at least 80%, at least 85%, at least 86%, at least 87%, at least 88%, at least 89%, at least 90%, at least 91%, at least 92%, at least 93%, at least 94%, at least 95%, at least 96%, at least 97%, at least 98%, at least 99%, or 100% sequence identity to SEQ ID NO: 28;
[1197] x. a polypeptide having at least 75%, at least 80%, at least 85%, at least 86%, at least 87%, at least 88%, at least 89%, at least 90%, at least 91%, at least 92%, at least 93%, at least 94%, at least 95%, at least 96%, at least 97%, at least 98%, at least 99%, or 100% sequence identity to SEQ ID NO: 29;
[1198] y. a polypeptide having at least 75%, at least 80%, at least 85%, at least 86%, at least 87%, at least 88%, at least 89%, at least 90%, at least 91%, at least 92%, at least 93%, at least 94%, at least 95%, at least 96%, at least 97%, at least 98%, at least 99%, or 100% sequence identity to SEQ ID NO: 30;
[1199] z. a polypeptide having at least 75%, at least 80%, at least 85%, at least 86%, at least 87%, at least 88%, at least 89%, at least 90%, at least 91%, at least 92%, at least 93%, at least 94%, at least 95%, at least 96%, at least 97%, at least 98%, at least 99%, or 100% sequence identity to SEQ ID NO: 31;
[1200] aa. a polypeptide having at least 75%, at least 80%, at least 85%, at least 86%, at least 87%, at least 88%, at least 89%, at least 90%, at least 91%, at least 92%, at least 93%, at least 94%, at least 95%, at least 96%, at least 97%, at least 98%, at least 99%, or 100% sequence identity to SEQ ID NO: 32;
[1201] bb. a polypeptide having at least 75%, at least 80%, at least 85%, at least 86%, at least 87%, at least 88%, at least 89%, at least 90%, at least 91%, at least 92%, at least 93%, at least 94%, at least 95%, at least 96%, at least 97%, at least 98%, at least 99%, or 100% sequence identity to SEQ ID NO: 33;
[1202] cc. a polypeptide having at least 75%, at least 80%, at least 85%, at least 86%, at least 87%, at least 88%, at least 89%, at least 90%, at least 91%, at least 92%, at least 93%, at least 94%, at least 95%, at least 96%, at least 97%, at least 98%, at least 99%, or 100% sequence identity to SEQ ID NO: 34;
[1203] dd. a polypeptide having at least 75%, at least 80%, at least 85%, at least 86%, at least 87%, at least 88%, at least 89%, at least 90%, at least 91%, at least 92%, at least 93%, at least 94%, at least 95%, at least 96%, at least 97%, at least 98%, at least 99%, or 100% sequence identity to SEQ ID NO: 36;
[1204] ee. a polypeptide having at least 75%, at least 80%, at least 85%, at least 86%, at least 87%, at least 88%, at least 89%, at least 90%, at least 91%, at least 92%, at least 93%, at least 94%, at least 95%, at least 96%, at least 97%, at least 98%, at least 99%, or 100% sequence identity to SEQ ID NO: 38;
[1205] ff. a polypeptide having at least 75%, at least 80%, at least 85%, at least 86%, at least 87%, at least 88%, at least 89%, at least 90%, at least 91%, at least 92%, at least 93%, at least 94%, at least 95%, at least 96%, at least 97%, at least 98%, at least 99%, or 100% sequence identity to SEQ ID NO: 39;
[1206] gg. a polypeptide having at least 75%, at least 80%, at least 85%, at least 86%, at least 87%, at least 88%, at least 89%, at least 90%, at least 91%, at least 92%, at least 93%, at least 94%, at least 95%, at least 96%, at least 97%, at least 98%, at least 99%, or 100% sequence identity to SEQ ID NO: 40;
[1207] hh. a polypeptide having at least 75%, at least 80%, at least 85%, at least 86%, at least 87%, at least 88%, at least 89%, at least 90%, at least 91%, at least 92%, at least 93%, at least 94%, at least 95%, at least 96%, at least 97%, at least 98%, at least 99%, or 100% sequence identity to SEQ ID NO: 41;
[1208] ii. a polypeptide having at least 75%, at least 80%, at least 85%, at least 86%, at least 87%, at least 88%, at least 89%, at least 90%, at least 91%, at least 92%, at least 93%, at least 94%, at least 95%, at least 96%, at least 97%, at least 98%, at least 99%, or 100% sequence identity to SEQ ID NO: 42;
[1209] jj. a polypeptide having at least 75%, at least 80%, at least 85%, at least 86%, at least 87%, at least 88%, at least 89%, at least 90%, at least 91%, at least 92%, at least 93%, at least 94%, at least 95%, at least 96%, at least 97%, at least 98%, at least 99%, or 100% sequence identity to SEQ ID NO: 43;
[1210] kk. a polypeptide having at least 75%, at least 80%, at least 85%, at least 86%, at least 87%, at least 88%, at least 89%, at least 90%, at least 91%, at least 92%, at least 93%, at least 94%, at least 95%, at least 96%, at least 97%, at least 98%, at least 99%, or 100% sequence identity to SEQ ID NO: 44;
[1211] ll. a polypeptide having at least 75%, at least 80%, at least 85%, at least 86%, at least 87%, at least 88%, at least 89%, at least 90%, at least 91%, at least 92%, at least 93%, at least 94%, at least 95%, at least 96%, at least 97%, at least 98%, at least 99%, or 100% sequence identity to SEQ ID NO: 45;
[1212] mm. a polypeptide having at least 75%, at least 80%, at least 85%, at least 86%, at least 87%, at least 88%, at least 89%, at least 90%, at least 91%, at least 92%, at least 93%, at least 94%, at least 95%, at least 96%, at least 97%, at least 98%, at least 99%, or 100% sequence identity to SEQ ID NO: 46;
[1213] nn. a polypeptide having at least 75%, at least 80%, at least 85%, at least 86%, at least 87%, at least 88%, at least 89%, at least 90%, at least 91%, at least 92%, at least 93%, at least 94%, at least 95%, at least 96%, at least 97%, at least 98%, at least 99%, or 100% sequence identity to SEQ ID NO: 47; and
[1214] oo. a polypeptide having at least 75%, at least 80%, at least 85%, at least 86%, at least 87%, at least 88%, at least 89%, at least 90%, at least 91%, at least 92%, at least 93%, at least 94%, at least 95%, at least 96%, at least 97%, at least 98%, at least 99%, or 100% sequence identity to SEQ ID NO: 48;
[1215] pp. a polypeptide having at least 75%, at least 80%, at least 85%, at least 86%, at least 87%, at least 88%, at least 89%, at least 90%, at least 91%, at least 92%, at least 93%, at least 94%, at least 95%, at least 96%, at least 97%, at least 98%, at least 99%, or 100% sequence identity to SEQ ID NO:199;
[1216] qq. a polypeptide having at least 75%, at least 80%, at least 85%, at least 86%, at least 87%, at least 88%, at least 89%, at least 90%, at least 91%, at least 92%, at least 93%, at least 94%, at least 95%, at least 96%, at least 97%, at least 98%, at least 99%, or 100% sequence identity to SEQ ID NO:200;
[1217] rr. a polypeptide having at least 75%, at least 80%, at least 85%, at least 86%, at least 87%, at least 88%, at least 89%, at least 90%, at least 91%, at least 92%, at least 93%, at least 94%, at least 95%, at least 96%, at least 97%, at least 98%, at least 99%, or 100% sequence identity to SEQ ID NO 201;
[1218] ss. a polypeptide having at least 75%, at least 80%, at least 85%, at least 86%, at least 87%, at least 88%, at least 89%, at least 90%, at least 91%, at least 92%, at least 93%, at least 94%, at least 95%, at least 96%, at least 97%, at least 98%, at least 99%, or 100% sequence identity to SEQ ID NO:202;
[1219] tt. a polypeptide having at least 75%, at least 80%, at least 85%, at least 86%, at least 87%, at least 88%, at least 89%, at least 90%, at least 91%, at least 92%, at least 93%, at least 94%, at least 95%, at least 96%, at least 97%, at least 98%, at least 99%, or 100% sequence identity to SEQ ID NO:203;
[1220] uu. a polypeptide having at least 75%, at least 80%, at least 85%, at least 86%, at least 87%, at least 88%, at least 89%, at least 90%, at least 91%, at least 92%, at least 93%, at least 94%, at least 95%, at least 96%, at least 97%, at least 98%, at least 99%, or 100% sequence identity to SEQ ID NO:204;
[1221] vv. a polypeptide having at least 75%, at least 80%, at least 85%, at least 86%, at least 87%, at least 88%, at least 89%, at least 90%, at least 91%, at least 92%, at least 93%, at least 94%, at least 95%, at least 96%, at least 97%, at least 98%, at least 99%, or 100% sequence identity to SEQ ID NO: 205;
[1222] ww. a polypeptide having at least 75%, at least 80%, at least 85%, at least 86%, at least 87%, at least 88%, at least 89%, at least 90%, at least 91%, at least 92%, at least 93%, at least 94%, at least 95%, at least 96%, at least 97%, at least 98%, at least 99%, or 100% sequence identity to SEQ ID NO:206;
[1223] xx. a polypeptide having at least 75%, at least 80%, at least 85%, at least 86%, at least 87%, at least 88%, at least 89%, at least 90%, at least 91%, at least 92%, at least 93%, at least 94%, at least 95%, at least 96%, at least 97%, at least 98%, at least 99%, or 100% sequence identity to SEQ ID NO:207;
[1224] yy. a polypeptide having at least 75%, at least 80%, at least 85%, at least 86%, at least 87%, at least 88%, at least 89%, at least 90%, at least 91%, at least 92%, at least 93%, at least 94%, at least 95%, at least 96%, at least 97%, at least 98%, at least 99%, or 100% sequence identity to SEQ ID NO:208;
[1225] zz. a polypeptide having at least 75%, at least 80%, at least 85%, at least 86%, at least 87%, at least 88%, at least 89%, at least 90%, at least 91%, at least 92%, at least 93%, at least 94%, at least 95%, at least 96%, at least 97%, at least 98%, at least 99%, or 100% sequence identity to SEQ ID NO:209;
[1226] aaa. a polypeptide having at least 75%, at least 80%, at least 85%, at least 86%, at least 87%, at least 88%, at least 89%, at least 90%, at least 91%, at least 92%, at least 93%, at least 94%, at least 95%, at least 96%, at least 97%, at least 98%, at least 99%, or 100% sequence identity to SEQ ID NO:232;
[1227] bbb. a polypeptide having at least 75%, at least 80%, at least 85%, at least 86%, at least 87%, at least 88%, at least 89%, at least 90%, at least 91%, at least 92%, at least 93%, at least 94%, at least 95%, at least 96%, at least 97%, at least 98%, at least 99%, or 100% sequence identity to SEQ ID NO:233;
[1228] ccc. a polypeptide having at least 75%, at least 80%, at least 85%, at least 86%, at least 87%, at least 88%, at least 89%, at least 90%, at least 91%, at least 92%, at least 93%, at least 94%, at least 95%, at least 96%, at least 97%, at least 98%, at least 99%, or 100% sequence identity to SEQ ID NO:234;
[1229] ddd. a polypeptide having at least 75%, at least 80%, at least 85%, at least 86%, at least 87%, at least 88%, at least 89%, at least 90%, at least 91%, at least 92%, at least 93%, at least 94%, at least 95%, at least 96%, at least 97%, at least 98%, at least 99%, or 100% sequence identity to SEQ ID NO:235;
[1230] eee. a polypeptide having at least 75%, at least 80%, at least 85%, at least 86%, at least 87%, at least 88%, at least 89%, at least 90%, at least 91%, at least 92%, at least 93%, at least 94%, at least 95%, at least 96%, at least 97%, at least 98%, at least 99%, or 100% sequence identity to SEQ ID NO:236; and
[1231] fff. a polypeptide having at least 75%, at least 80%, at least 85%, at least 86%, at least 87%, at least 88%, at least 89%, at least 90%, at least 91%, at least 92%, at least 93%, at least 94%, at least 95%, at least 96%, at least 97%, at least 98%, at least 99%, or 100% sequence identity to SEQ ID NO:237.

[1232] In a further embodiment, the invention relates to an animal feed additive or animal feed premix comprising one or more polypeptides of fungal origin having catalase activity, wherein the feed additive or premix further comprises
[1233] a. one or more polypeptides having superoxide dismutase activity and/or
[1234] b. one or more vitamins, wherein the one or more vitamins is preferably a fat-soluble vitamin, for example vitamin E.

[1235] In a preferred embodiment, a superoxide dismutase is further added to the animal feed additive or animal feed or animal feed premix comprising the fungal catalase. A catalase may be classified as an EC 1.11.1.6 catalase or as an EP 1.11.1.21 catalase peroxidase. A preferred example of the catalase according to the invention is a polypeptide having at least 80% sequence identity to SEQ ID NO:6, SEQ ID NO:7, SEQ ID NO:250 and SEQ ID NO:251.

[1236] A preferred animal feed premix, animal feed additive, or animal feed comprises one or more polypeptides having catalase activity, vitamin E and optionally selenium and is used as antioxidant, preferably in feed and feed premixes or as a replacement or partial replacement of antibiotics in animal feed.

[1237] Examples of commercial vitamin E and selenium are Rovimix®E50 and SePlex (DSM Nutritional Products).
[1238] In a further embodiment, the animal feed or animal feed additive further comprises one or more components selected from the list consisting of:
[1239] i. one or more carriers;
[1240] ii. one or more microbes;
[1241] iii. one or more vitamins;
[1242] iv. one or more minerals;
[1243] v. one or more amino acids;
[1244] vi. one of more organic acids;
[1245] vii. and one or more other feed ingredients.

[1246] The animal feed or animal feed additive may furthermore comprise additional enzymes but enzmes other than fungal catalase and optionally a superoxide dismutase, are not essential for the beneficial effects of the invention. In one embodiment, the animal feed additive comrpises an enzyme component consisting of enzymes selected from the group consisting of a catalase of fungal origin and optionally a superoxide dismustase of fungal origin, wherein the only enzymes in the feed additive are a catalase and optionally a superoxide dismutase. The feed additive typically comprises one or more fungal superoxide dismutases, one or more polypeptides having catalase activity and/or further comprising one or more vitamins.

[1247] In one aspect, the invention relates to an animal feed comprising an animal feed additive, one or more protein sources and one or more energy sources characterised in the animal feed further comprises one or more polypeptides having SOD activity, wherein the animal feed
[1248] a. reduces FCR by between 1 to 10%; or
[1249] b. increases average daily WG by between 1 to 10%; or
[1250] c. increases average daily feed intake by between 1 to 10%; or
[1251] d. any combinations of a.-c.;
[1252] when feed to the animal as compared to animals fed a feed composition without the polypeptides.

[1253] In a further aspect, the invention relates to an animal feed comprising an animal feed additive, one or more protein sources and one or more energy sources characterised in the animal feed further comprises one or more polypeptides having catalase activity, wherein the animal feed
[1254] a. improves or enhances immune response; or
[1255] b. reduces inflammation;
[1256] when feed to the animal as compared to animals fed a feed composition without the polypeptides.

[1257] A further aspect of the invention is directed to the prophylactic care or management, reduction or prevention of oxidative stess in a monogastric animal comprising administrating to said animal a catalase of fungal origin and optionally a superoxide dismutase of fungal origin. Oxidative stress is a disturbance between antioxidant/oxidant status in favor of excessive generation, or slower removal of free radicals, such as reactive oxygen species (ROS). Excessive ROS content leads to damage of proteins, lipids and nucleic acids, with consequent loss of their biological functions and subsequent tissue injury. Oxidative stress has been linked to initiation and progression of several infectious diseases. Accordingly, a further aspect of the invention is the prophylactic care or management of infectious diseases in monogastric animal comprising administrating to said animal superoxide dismutase and optionally catalase. The administration is typically by means of feeding said animal a feed additive comprising an enzyme component, wherein the enzyme component comprises all of the enzymes of the additive and consists of a catalase of fungal origin and optionally of a superoxide dismutase of fungal origin.

[1258] In respect to the improvement of one or more performance parameters, the invention is particularly characterized in that the EPEF and/or FCR and/or GR and/or WG is improved by at least 1% and that the MR is reduced by at least 1%.

[1259] The animal is a mono-gastric animal, e.g. pigs or swine (including, but not limited to, piglets, growing pigs, and sows); poultry (including but not limited to poultry, turkey, duck, quail, guinea fowl, goose, pigeon, squab, chicken, broiler, layer, pullet and chick); pets (including but not limited to cats and dogs); fish (including but not limited to amberjack, arapaima, barb, bass, bluefish, bocachico, bream, bullhead, cachama, carp, catfish, catla, chanos, char, cichlid, cobia, cod, crappie, dorada, drum, eel, goby, goldfish, gourami, grouper, guapote, halibut, java, labeo, lai, loach, mackerel, milkfish, mojarra, mudfish, mullet, paco, pearlspot, pejerrey, perch, pike, pompano, roach, salmon, sampa, sauger, sea bass, seabream, shiner, sleeper, snakehead, snapper, snook, sole, spinefoot, sturgeon, sunfish, sweetfish, tench, terror, tilapia, trout, tuna, turbot, vendace, walleye and whitefish); and crustaceans (including but not limited to shrimps and prawns). In a more preferred embodiment, the animal is selected from the group consisting of swine, poultry, crustaceans and fish. In an even more preferred embodiment, the animal is selected from the group consisting of swine, piglet, growing pig, sow, chicken, broiler, layer, pullet and chick, typically wherein the animal has experienced heat stress, cold stress, nutritional stress and/or oxidative stress.

[1260] The polypeptide having catalase activity is preferably dosed at a level of 100 to 1000 U enzyme protein per kg animal feed, such as 200 to 900 U, 300 to 800, 400 to 700, 500 to 600 enzyme protein per kg animal feed, or any combination of these intervals.

[1261] The polypeptide having superoxide dismutase activity is preferably dosed at a level of 100 to 5000 U enzyme protein per kg animal feed, such as 200 to 3000 U, 500 to 2500 U, 500 to 2000 U, 500 to 1500 U enzyme protein per kg animal feed, or any combination of these intervals.

[1262] Examples of dosing include SEQ ID No. 1 at 1250 or 2500 U/kg, SEQ ID NO 7 and SEQ ID NO 250 at 100 U/kg) and combinations (SEQ ID No. 1 500 U/kg+SEQ ID NO 7 100 U/kg; and SEQ ID No. 1 500 U/kg+SEQ ID NO 250 100 U/kg.

[1263] The protein source of the animal feed is selected from the group consisting of soybean, wild soybean, beans, lupin, tepary bean, scarlet runner bean, slimjim bean, lima bean, French bean, Broad bean (fava bean), chickpea, lentil, peanut, Spanish peanut, canola, sunflower seed, cotton seed, rapeseed (oilseed rape) or pea or in a processed form such as soybean meal, full fat soy bean meal, soy protein concentrate (SPC), fermented soybean meal (FSBM), sunflower meal, cotton seed meal, rapeseed meal, fish meal, bone meal, feather meal, whey or any combination thereof.

[1264] The energy source of the animal feed is selected from the group consisting of maize, corn, sorghum, barley, wheat, oats, rice, triticale, rye, beet, sugar beet, spinach, potato, cassava, quinoa, cabbage, switchgrass, millet, pearl millet, foxtail millet or in a processed form such as milled corn, milled maize, potato starch, cassava starch, milled sorghum, milled switchgrass, milled millet, milled foxtail millet, milled pearl millet, or any combination thereof.

[1265] In a preferred example, the animal feed further comprises one or more components selected from the list consisting of one or more additional enzymes; one or more microbes; one or more vitamins; one or more minerals; one or more amino acids; and one or more other feed ingredients, as described herein.

### Methods of the Invention

[1266] In a further aspect, the invention relates to a method of improving one or more performance parameters in an animal comprising administering to the animal an animal feed or animal feed additive comprising one or more polypeptides having catalase activity of fungal origin, wherein the one or more performance parameters is selected from the group consisting of the European Production Efficiency Factor (EPEF), Feed Conversion Ratio (FCR), Growth Rate (GR), Body Weight Gain (WG), Mortality Rate (MR) and Flock Uniformity (FU).

[1267] In a further aspect, the invention relates to a method of improving or enhancing immune response and/or reducing inflammation and/or for the modulation of the gut flora in an animal comprising administering to the animal an animal feed or animal feed additive comprising one or more polypeptides having catalase activity. A related aspect of the invention is directed to the prophylactic care or management, reduction or prevention of inflammation in the intestinal tract of a monogastric animal.

[1268] In a further aspect, the invention relates to a method of reducing or eliminating the use of antibiotics administered to animal feed, comprising administering to the animal an animal feed or animal feed additive comprising of one or more polypeptides having catalase activity.

[1269] In a further aspect, the invention relates to a method of reducing cellular markers of reactive oxygen species or free radicals in animal body comprising administering to the animal an animal feed or animal feed additive comprising one or more polypeptides having catalase activity.

[1270] A further aspect of the invention is directed to the prophylactic care or management, reduction or prevention of oxidative stess in a monogastric animal comprising administrating to said animal a polypeptide having catalase activity and optionally a polypeptide having catalase activity. Oxidative stress is a disturbance between antioxidant/oxidant status in favor of excessive generation, or slower removal of free radicals, such as reactive oxygen species (ROS). Excessive ROS content leads to damage of proteins, lipids and nucleic acids, with consequent loss of their biological functions and subsequent tissue injury. Oxidative stress has been linked to initiation and progression of several infectious diseases. Accordingly, a further aspect of the invention is the prophylactic care or management of infectious diseases in monogastric animal comprising administrating to said animal a polypeptide having catalase activity and optionally a polypeptide having SOD activity. The administration is typically by means of feeding said animal a feed additive comprising an enzyme component, wherein the enzyme component comprises all of the enzymes of the additive and consists of a polypeptide having catalase activity and optionally a polypeptide having SOD activity.

[1271] In respect to the improvement of one or more performance parameters, the invention is particularly characterized in that the EPEF and/or FCR and/or GR and/or WG is improved by at least 1% and that the MR is reduced by at least 1%.

[1272] The animal is a mono-gastric animal, e.g. pigs or swine (including, but not limited to, piglets, growing pigs, and sows); poultry (including but not limited to poultry, turkey, duck, quail, guinea fowl, goose, pigeon, squab, chicken, broiler, layer, pullet and chick); pets (including but not limited to cats and dogs); fish (including but not limited to amberjack, arapaima, barb, bass, bluefish, bocachico, bream, bullhead, cachama, carp, catfish, catla, chanos, char, cichlid, cobia, cod, crappie, dorada, drum, eel, goby, goldfish, gourami, grouper, guapote, halibut, java, labeo, lai, loach, mackerel, milkfish, mojarra, mudfish, mullet, paco, pearlspot, pejerrey, perch, pike, pompano, roach, salmon, sampa, sauger, sea bass, seabream, shiner, sleeper, snakehead, snapper, snook, sole, spinefoot, sturgeon, sunfish, sweetfish, tench, terror, tilapia, trout, tuna, turbot, vendace, walleye and whitefish); and crustaceans (including but not limited to shrimps and prawns). In a more preferred embodiment, the animal is selected from the group consisting of swine, poultry, crustaceans and fish. In an even more preferred embodiment, the animal is selected from the group consisting of swine, piglet, growing pig, sow, chicken, broiler, layer, pullet and chick, typically wherein the animal has expericed heat stress, cold stress, nutritional stress and/or oxidative stress.

[1273] A further aspect of the invention is directed to a method of feeding poultry or pigs comprising adding the animal feed additive of the invention to a raw feed material.

[1274] A further aspect of the invention is directed to a method of feeding an animal, wherein the animal feed or animal feed additive further comprises one or more components selected from the list consisting of:
[1275] viii. one or more carriers;
[1276] ix. one or more microbes;
[1277] x. one or more vitamins;
[1278] xi. one or more minerals;
[1279] xii. one or more amino acids;
[1280] xiii. one of more organic acids;
[1281] xiv. and one or more other feed ingredients.

[1282] One may furthermore administer additional enzymes but enzymes other than a fungal catalase and optionally a superoxide dismustase, are not essential for the beneficial effects of the invention.

### Enzyme Compositions and Formulations

[1283] The polypeptide having catalase activity of the invention may be formulated as a liquid or a solid. For a liquid formulation, the formulating agent may comprise a polyol (such as e.g. glycerol, ethylene glycol or propylene glycol), a salt (such as e.g. sodium chloride, sodium benzoate, potassium sorbate) or a sugar or sugar derivative (such as e.g. dextrin, glucose, sucrose, and sorbitol). Thus, in one embodiment, the composition is a liquid composition comprising the polypeptide of the invention and one or more formulating agents selected from the list consisting of glycerol, ethylene glycol, 1,2-propylene glycol, 1,3-propylene glycol, sodium chloride, sodium benzoate, potassium sorbate, dextrin, glucose, sucrose, and sorbitol. The liquid formulation may be sprayed onto the feed after it has been pelleted or may be added to drinking water given to the animals.

[1284] In one embodiment, the liquid formulation further comprises 20%-80% polyol (i.e. total amount of polyol), preferably 25%-75% polyol, more preferably 30%-70% polyol, more preferably 35%-65% polyol or most preferably 40%-60% polyol. In one embodiment, the liquid formulation comprises 20%-80% polyol, preferably 25%-75% polyol, more preferably 30%-70% polyol, more preferably 35%-65% polyol or most preferably 40%-60% polyol wherein the polyol is selected from the group consisting of glycerol, sorbitol, propylene glycol (MPG), ethylene glycol, diethylene glycol, triethylene glycol, 1, 2-propylene glycol or 1, 3-propylene glycol, dipropylene glycol, polyethylene glycol (PEG) having an average molecular weight below about 600 and polypropylene glycol (PPG) having an average molecular weight below about 600. In one embodiment, the liquid formulation comprises 20%-80% polyol (i.e. total amount of polyol), preferably 25%-75% polyol, more preferably 30%-70% polyol, more preferably 35%-65% polyol or most preferably 40%-60% polyol wherein the polyol is selected from the group consisting of glycerol, sorbitol and propylene glycol (MPG).

[1285] In one embodiment, the liquid formulation further comprises preservative, preferably selected from the group consisting of sodium sorbate, potassium sorbate, sodium benzoate and potassion benzoate or any combination thereof. In one embodiment, the liquid formulation comprises 0.02% to 1.5% w/w preservative, more preferably 0.05% to 1.0% w/w preservative or most preferably 0.1% to 0.5% w/w preservative. In one embodiment, the liquid formulation comprises 0.001% to 2.0% w/w preservative (i.e. total amount of preservative), preferably 0.02% to 1.5% w/w preservative, more preferably 0.05% to 1.0% w/w preservative or most preferably 0.1% to 0.5% w/w preservative wherein the preservative is selected from the group consisting of sodium sorbate, potassium sorbate, sodium benzoate and potassium benzoate or any combination thereof.

[1286] For a solid formulation, the formulation may be for example as a granule, spray dried powder or agglomerate (e.g. as disclosed in WO2000/70034). The formulating agent may comprise a salt (organic or inorganic zinc, sodium, potassium or calcium salts such as e.g. such as calcium acetate, calcium benzoate, calcium carbonate, calcium chloride, calcium citrate, calcium sorbate, calcium sulfate, potassium acetate, potassium benzoate, potassium carbonate, potassium chloride, potassium citrate, potassium sorbate, potassium sulfate, sodium acetate, sodium benzoate, sodium carbonate, sodium chloride, sodium citrate, sodium sulfate, zinc acetate, zinc benzoate, zinc carbonate, zinc chloride, zinc citrate, zinc sorbate, zinc sulfate), starch or a sugar or sugar derivative (such as e.g. sucrose, dextrin, glucose, lactose, sorbitol).

[1287] In one embodiment, the composition is a solid composition, such as a spray dried composition, comprising the polypeptide having SOD activity of the invention and one or more formulating agents selected from the list consisting of sodium chloride, sodium benzoate, potassium sorbate, sodium sulfate, potassium sulfate, magnesium sulfate, sodium thiosulfate, calcium carbonate, sodium citrate, dextrin, glucose, sucrose, sorbitol, lactose, starch and cellulose. In a preferred embodiment, the formulating agent is selected from one or more of the following compounds: sodium sulfate, dextrin, cellulose, sodium thiosulfate, magnesium sulfate and calcium carbonate.

[1288] The present invention also relates to enzyme granules/particles comprising the polypeptide having catalase activity of the invention optionally combined with one or more additional enzymes. The granule is composed of a core, and optionally one or more coatings (outer layers) surrounding the core.

[1289] Typically, the granule/particle size, measured as equivalent spherical diameter (volume based average particle size), of the granule is 20-2000 μm, particularly 50-1500 μm, 100-1500 pm or 250-1200 μm.

[1290] The core can be prepared by granulating a blend of the ingredients, e.g., by a method comprising granulation techniques such as crystallization, precipitation, pan-coating, fluid bed coating, fluid bed agglomeration, rotary atomization, extrusion, prilling, spheronization, size reduction methods, drum granulation, and/or high shear granulation.

[1291] Methods for preparing the core can be found in Handbook of Powder Technology; Particle size enlargement by C. E. Capes; Volume 1; 1980; Elsevier. Preparation methods include known feed and granule formulation technologies, e.g.:

[1292] a) spray dried products, wherein a liquid enzyme-containing solution is atomized in a spray drying tower to form small droplets which during their way down the drying tower dry to form an enzyme-containing particulate material;

[1293] b) layered products, wherein the enzyme is coated as a layer around a pre-formed inert core particle, wherein an enzyme-containing solution is atomized, typically in a fluid bed apparatus wherein the pre-formed core particles are fluidized, and the enzyme-containing solution adheres to the core particles and dries up to leave a layer of dry enzyme on the surface of the core particle. Particles of a desired size can be obtained this way if a useful core particle of the desired size can be found. This type of product is described in, e.g., WO 97/23606;

[1294] c) absorbed core particles, wherein rather than coating the enzyme as a layer around the core, the enzyme is absorbed onto and/or into the surface of the core. Such a process is described in WO 97/39116.

[1295] d) extrusion or pelletized products, wherein an enzyme-containing paste is pressed to pellets or under pressure is extruded through a small opening and cut into particles which are subsequently dried. Such particles usually have a considerable size because of the material in which the extrusion opening is made (usually a plate with bore holes) sets a limit on the allowable pressure drop over the extrusion opening. Also, very high extrusion pressures when using a small opening increase heat generation in the enzyme paste, which is harmful to the enzyme;

[1296] e) prilled products, wherein an enzyme-containing powder is suspended in molten wax and the suspension is sprayed, e.g., through a rotating disk atomiser, into a cooling chamber where the droplets quickly solidify (Michael S. Showell (editor); Powdered detergents; Surfactant Science Series; 1998; vol. 71; page 140-142; Marcel Dekker). The product obtained is one wherein the enzyme is uniformly distributed throughout an inert material instead of being concentrated on its surface. Also US 4,016,040 and US 4,713,245 are documents relating to this technique;

[1297] f) mixer granulation products, wherein a liquid is added to a dry powder composition of, e.g., conventional granulating components, the enzyme being introduced either via the liquid or the powder or both. The liquid and the powder are mixed and as the moisture of the liquid is absorbed in the dry powder, the components of the dry powder will start to adhere and agglomerate and particles will build up, forming granulates comprising the enzyme. Such a process is described in US 4,106,991 and related documents EP 170360, EP 304332, EP 304331, WO 90/09440 and WO 90/09428. In a particular product of this process wherein various high-shear mixers can be used as granulators, granulates consisting of enzyme as enzyme, fillers and binders etc. are mixed with cellulose fibres to reinforce the particles to give the so-called T-granulate. Reinforced particles, being more robust, release less enzymatic dust.

[1298] g) size reduction, wherein the cores are produced by milling or crushing of larger particles, pellets, tablets, briquettes etc. containing the enzyme. The wanted core particle fraction is obtained by sieving the milled or crushed product. Over and undersized particles can be recycled. Size reduction is described in (Martin Rhodes (editor); Principles of Powder Technology; 1990; Chapter 10; John Wiley & Sons);

[1299] h) fluid bed granulation, which involves suspending particulates in an air stream and spraying a liquid onto the fluidized particles via nozzles. Particles hit by spray droplets get wetted and become tacky. The tacky particles collide with other particles and adhere to them and form a granule;

[1300] i) the cores may be subjected to drying, such as in a fluid bed drier. Other known methods for drying granules in the feed or detergent industry can be used by the skilled person. The drying preferably takes place at a product temperature of from 25 to 90° C. For some enzymes it is important the cores comprising the enzyme contain a low amount of water before coating. If water sensitive enzymes are coated before excessive water is removed, it will be trapped within the core and it may affect the activity of the enzyme negatively. After drying, the cores preferably contain 0.1-10% w/w water.

[1301] The core may include additional materials such as fillers, fibre materials (cellulose or synthetic fibres), stabilizing agents, solubilizing agents, suspension agents, viscosity regulating agents, light spheres, plasticizers, salts, lubricants and fragrances.

[1302] The core may include a binder, such as synthetic polymer, wax, fat, or carbohydrate.

[1303] The core may include a salt of a multivalent cation, a reducing agent, an antioxidant, a peroxide decomposing catalyst and/or an acidic buffer component, typically as a homogenous blend.

[1304] In one embodiment, the core comprises a material selected from the group consisting of salts (such as calcium acetate, calcium benzoate, calcium carbonate, calcium chloride, calcium citrate, calcium sorbate, calcium sulfate, potassium acetate, potassium benzoate, potassium carbonate, potassium chloride, potassium citrate, potassium sorbate, potassium sulfate, sodium acetate, sodium benzoate, sodium carbonate, sodium chloride, sodium citrate, sodium sulfate, zinc acetate, zinc benzoate, zinc carbonate, zinc chloride, zinc citrate, zinc sorbate, zinc sulfate), starch or a sugar or sugar derivative (such as e.g. sucrose, dextrin, glucose, lactose, sorbitol), sugar or sugar derivative (such as e.g. sucrose, dextrin, glucose, lactose, sorbitol), small organic molecules, starch, flour, cellulose and minerals and clay minerals (also known as hydrous aluminium phyllosilicates). In one embodiment, the core comprises a clay mineral such as kaolinite or kaolin. The core may include an inert particle with the enzyme absorbed into it, or applied onto the surface, e.g., by fluid bed coating.

[1305] The core may have a diameter of 20-2000 μm, particularly 50-1500 μm, 100-1500 μm or 250-1200 μm.

[1306] The core may be surrounded by at least one coating, e.g., to improve the storage stability, to reduce dust formation during handling, or for coloring the granule. The optional coating(s) may include a salt and/or wax and/or flour coating, or other suitable coating materials.

[1307] The coating may be applied in an amount of at least 0.1% by weight of the core, e.g., at least 0.5%, 1% or 5%. The amount may be at most 100%, 70%, 50%, 40% or 30%.

[1308] The coating is preferably at least 0.1 μm thick, particularly at least 0.5 μm, at least 1 μm or at least 5 μm. In some embodiments the thickness of the coating is below 100 μm, such as below 60 μm, or below 40 μm.

[1309] The coating should encapsulate the core unit by forming a substantially continuous layer. A substantially continuous layer is to be understood as a coating having few or no holes, so that the core unit is encapsulated or enclosed with few or no uncoated areas. The layer or coating should in particular be homogeneous in thickness.

[1310] The coating can further contain other materials as known in the art, e.g., fillers, antisticking agents, pigments, dyes, plasticizers and/or binders, such as titanium dioxide, kaolin, calcium carbonate or talc.

[1311] The granule may comprise a core comprising the polypeptide having SOD activity of the invention, one or more salt coatings and one or more wax coatings. Examples of enzyme granules with multiple coatings are shown in WO1993/07263, WO1997/23606 and WO2016/149636.

[1312] A salt coating may comprise at least 60% by weight of a salt, e.g., at least 65%, at least 70%, at least 75%, at least 80%, at least 85%, at least 90%, at least 95% or at least 99% by weight.

[1313] The salt may be added from a salt solution where the salt is completely dissolved or from a salt suspension wherein the fine particles are less than 50 μm, such as less than 10 μm or less than 5 μm.

[1314] The salt coating may comprise a single salt or a mixture of two or more salts. The salt may be water soluble, in particular having a solubility at least 0.1 g in 100 g of water at 20° C., preferably at least 0.5 g per 100 g water, e.g., at least 1 g per 100 g water, e.g., at least 5 g per 100 g water.

[1315] The salt may be an inorganic salt, e.g., salts of sulfate, sulfite, phosphate, phosphonate, nitrate, chloride or carbonate or salts of simple organic acids (less than 10 carbon atoms, e.g., 6 or less carbon atoms) such as citrate, malonate or acetate. Examples of cations in these salts are alkali or earth alkali metal ions, the ammonium ion or metal ions of the first transition series, such as sodium, potassium, magnesium, calcium, zinc or aluminium. Examples of anions include chloride, bromide, iodide, sulfate, sulfite, bisulfite, thiosulfate, phosphate, monobasic phosphate, dibasic phosphate, hypophosphite, dihydrogen pyrophosphate, tetraborate, borate, carbonate, bicarbonate, metasilicate, citrate, malate, maleate, malonate, succinate, sorbate, lactate, formate, acetate, butyrate, propionate, benzoate, tartrate, ascorbate or gluconate. In particular alkali- or earth alkali metal salts of sulfate, sulfite, phosphate, phosphonate, nitrate, chloride or carbonate or salts of simple organic acids such as citrate, malonate or acetate may be used.

[1316] The salt in the coating may have a constant humidity at 20° C. above 60%, particularly above 70%, above 80% or above 85%, or it may be another hydrate form of such a salt (e.g., anhydrate). The salt coating may be as described in WO1997/05245, WO1998/54980, WO1998/55599, WO2000/70034, WO2006/034710, WO2008/017661, WO2008/017659, WO2000/020569, WO2001/004279, WO1997/05245, WO2000/01793, WO2003/059086, WO2003/059087, WO2007/031483, WO2007/031485, WO2007/044968, WO2013/192043, WO2014/014647 and WO2015/197719 or polymer coating such as described in WO 2001/00042.

[1317] Specific examples of suitable salts are NaCl (CH20° C.=76%), Na2CO3 (CH20° C.=92%), NaNO3 (CH20° C.=73%), Na2HPO4 (CH20° C.=95%), Na3PO4 (CH25° C.=92%), NH4Cl (CH20° C.=79.5%), (NH4)2HPO4 (CH20° C.=93,0%), NH4H2PO4 (CH20° C.=93.1%), (NH4)2504 (CH20° C.=81.1%), KCl (CH20° C.=85%), K2HPO4 (CH20° C.=92%), KH2PO4 (CH20° C.=96.5%), KNO3 (CH20° C.=93.5%), Na2SO4 (CH20° C.=93%), K2SO4 (CH20° C.=98%), KHSO4 (CH20° C.=86%), MgSO4 (CH20° C.=90%), ZnSO4 (CH20° C.=90%) and sodium citrate (CH25° C.=86%). Other examples include NaH2PO4, (NH4)H2PO4, CuSO4, Mg(NO3)2, magnesium acetate, calcium acetate, calcium benzoate, calcium carbonate, calcium chloride, calcium citrate, calcium sorbate, calcium sulfate, potassium acetate, potassium benzoate, potassium carbonate, potassium chloride, potassium citrate, potassium sorbate, sodium acetate, sodium benzoate, sodium citrate, sodium sulfate, zinc acetate, zinc benzoate, zinc carbonate, zinc chloride, zinc citrate and zinc sorbate.

[1318] The salt may be in anhydrous form, or it may be a hydrated salt, i.e. a crystalline salt hydrate with bound water(s) of crystallization, such as described in WO 99/32595. Specific examples include anhydrous sodium sulfate (Na2SO4), anhydrous magnesium sulfate (MgSO4), magnesium sulfate heptahydrate (MgSO4.7H2O), zinc sulfate heptahydrate (ZnSO4.7H2O), sodium phosphate dibasic heptahydrate (Na2HPO4.7H2O), magnesium nitrate hexahydrate (Mg(NO3)2(6H2O)), sodium citrate dihydrate and magnesium acetate tetrahydrate.

[1319] Preferably the salt is applied as a solution of the salt, e.g., using a fluid bed.

[1320] A wax coating may comprise at least 60% by weight of a wax, e.g., at least 65%, at least 70%, at least 75%, at least 80%, at least 85%, at least 90%, at least 95% or at least 99% by weight.

[1321] Specific examples of waxes are polyethylene glycols; polypropylenes; Carnauba wax; Candelilla wax; bees wax; hydrogenated plant oil or animal tallow such as polyethylene glycol (PEG), methyl hydroxy-propyl cellulose (MHPC), polyvinyl alcohol (PVA), hydrogenated ox tallow, hydrogenated palm oil, hydrogenated cotton seeds and/or hydrogenated soy bean oil; fatty acid alcohols; mono-glycerides and/or di-glycerides, such as glyceryl stearate, wherein stearate is a mixture of stearic and palmitic acid; micro-crystalline wax; paraffin's; and fatty acids, such as hydrogenated linear long chained fatty acids and derivatives thereof. A preferred wax is palm oil or hydrogenated palm oil.

[1322] Non-dusting granulates may be produced, e.g., as disclosed in U.S. Patent Nos. 4,106,991 and 4,661,452 and may optionally be coated by methods known in the art. The coating materials can be waxy coating materials and film-forming coating materials. Examples of waxy coating materials are poly(ethylene oxide) products (polyethyleneglycol, PEG) with mean molar weights of 1000 to 20000; ethoxylated nonylphenols having from 16 to 50 ethylene oxide units; ethoxylated fatty alcohols in which the alcohol contains from 12 to 20 carbon atoms and in which there are 15 to 80 ethylene oxide units; fatty alcohols; fatty acids; and mono- and di- and triglycerides of fatty acids. Examples of film-forming coating materials suitable for application by fluid bed techniques are given in GB 1483591.

[1323] The granulate may further comprise one or more additional enzymes. Each enzyme will then be present in more granules securing a more uniform distribution of the enzymes, and also reduces the physical segregation of different enzymes due to different particle sizes. Methods for producing multi-enzyme co-granulates is disclosed in the ip.com disclosure IPCOM000200739D.

### Animal Feed

[1324] Animal feed compositions or diets have a relatively high content of protein. Poultry and pig diets can be characterised as indicated in Table B of WO 01/58275, columns 2-3. Fish diets can be characterised as indicated in column 4 of this Table B. Furthermore, such fish diets usually have a crude fat content of 200-310 g/kg.

[1325] An animal feed composition according to the invention has a crude protein content of 50-800 g/kg, and furthermore comprises one or more polypeptides having SOD activity as described herein.

[1326] Furthermore, or in the alternative (to the crude protein content indicated above), the animal feed composition of the invention has a content of metabolisable energy of 10-30 MJ/kg; and/or a content of calcium of 0.1-200 g/kg; and/or a content of available phosphorus of 0.1-200 g/kg; and/or a content of methionine of 0.1-100 g/kg; and/or a content of methionine plus cysteine of 0.1-150 g/kg; and/or a content of lysine of 0.5-50 g/kg.

[1327] In particular embodiments, the content of metabolisable energy, crude protein, calcium, phosphorus, methionine, methionine plus cysteine, and/or lysine is within any one of ranges 2, 3, 4 or 5 in Table B of WO 01/58275 (R. 2-5).

[1328] Crude protein is calculated as nitrogen (N) multiplied by a factor 6.25, i.e. Crude protein (g/kg)=N (g/kg)×6.25. The nitrogen content is determined by the Kjeldahl method (A.O.A.C., 1984, Official Methods of Analysis 14th ed., Association of Official Analytical Chemists, Washington DC).

[1329] Metabolisable energy can be calculated on the basis of the NRC publication Nutrient requirements in swine, ninth revised edition 1988, subcommittee on swine nutrition, committee on animal nutrition, board of agriculture, national research council. National Academy Press, Washington, D.C., pp. 2-6, and the European Table of Energy Values for Poultry Feed-stuffs, Spelderholt centre for poultry research and extension, 7361 DA Beekbergen, The Netherlands. Grafisch bedrijf Ponsen & looijen by, Wageningen. ISBN 90-71463-12-5.

[1330] The dietary content of calcium, available phosphorus and amino acids in complete animal diets is calculated on the basis of feed tables such as Veevoedertabel 1997, gegevens over chemische samenstelling, verteerbaarheid en voederwaarde van voedermiddelen, Central Veevoederbureau, Runderweg 6, 8219 pk Lelystad. ISBN 90-72839-13-7.

[1331] In a particular embodiment, the animal feed composition of the invention contains at least one vegetable protein as defined above.

[1332] The animal feed composition of the invention may also contain animal protein, such as Meat and Bone Meal, Feather meal, and/or Fish Meal, typically in an amount of 0-25%. The animal feed composition of the invention may also comprise Dried Distillers Grains with Solubles (DDGS), typically in amounts of 0-30%.

[1333] In still further particular embodiments, the animal feed composition of the invention contains 0-80% maize; and/or 0-80% sorghum; and/or 0-70% wheat; and/or 0-70% Barley; and/or 0-30% oats; and/or 0-40% soybean meal; and/or 0-25% fish meal; and/or 0-25% meat and bone meal; and/or 0-20% whey.

[1334] The animal feed may comprise vegetable proteins. In particular embodiments, the protein content of the vegetable proteins is at least 10, 20, 30, 40, 50, 60, 70, 80, or 90% (w/w). Vegetable proteins may be derived from vegetable protein sources, such as legumes and cereals, for example, materials from plants of the families Fabaceae (Leguminosae), Cruciferaceae, Chenopodiaceae, and Poaceae, such as soy bean meal, lupin meal, rapeseed meal, and combinations thereof.

[1335] In a particular embodiment, the vegetable protein source is material from one or more plants of the family Fabaceae, e.g., soybean, lupine, pea, or bean. In another particular embodiment, the vegetable protein source is material from one or more plants of the family Chenopodiaceae, e.g. beet, sugar beet, spinach or quinoa. Other examples of vegetable protein sources are rapeseed, and cabbage. In another particular embodiment, soybean is a preferred vegetable protein source. Other examples of vegetable protein sources are cereals such as barley, wheat, rye, oat, maize (corn), rice, and sorghum.

[1336] Animal diets can e.g. be manufactured as mash feed (non-pelleted) or pelleted feed. Typically, the milled feed-stuffs are mixed and sufficient amounts of essential vitamins and minerals are added according to the specifications for the species in question. Enzymes can be added as solid or liquid enzyme formulations. For example, for mash feed a solid or liquid enzyme formulation may be added before or during the ingredient mixing step. For pelleted feed the (liquid or solid) SOD/enzyme preparation may also be added before or during the feed ingredient step. Typically a liquid enzyme preparation comprises the SOD of the invention optionally with a polyol, such as glycerol, ethylene glycol or propylene glycol, and is added after the pelleting step, such as by spraying the liquid formulation onto the pellets. The SOD may also be incorporated in a feed additive or premix.

[1337] In an embodiment, the composition comprises one or more additional enzymes. In an embodiment, the composition comprises one or more microbes. In an embodiment, the composition comprises one or more vitamins. In an embodiment, the composition comprises one or more minerals. In an embodiment, the composition comprises one or more amino acids. In an embodiment, the composition comprises one or more other feed ingredients.

[1338] In another embodiment, the composition comprises one or more of the polypeptides of the invention, one or more formulating agents and one or more additional enzymes. In an embodiment, the composition comprises one or more of the polypeptides of the invention, one or more formulating agents and one or more microbes. In an embodiment, the composition comprises one or more of the polypeptides of the invention, one or more formulating agents and one or more vitamins. In an embodiment, the composition comprises one or more of the polypeptides of the invention and one or more minerals. In an embodiment, the composition comprises the polypeptide of the invention, one or more formulating agents and one or more amino acids. In an embodiment, the composition comprises one or more of the polypeptides of the invention, one or more formulating agents and one or more other feed ingredients.

[1339] In a further embodiment, the composition comprises one or more of the polypeptides of the invention, one or more formulating agents and one or more components selected from the list consisting of: one or more additional enzymes; one or more microbes; one or more vitamins; one or more minerals; one or more amino acids; and one or more other feed ingredients.

[1340] The final catalase concentration in the diet is within the range of 100 to 1000 mg enzyme protein per kg animal feed, such as 200 to 900 mg, 300 to 800 mg, 400 to 700 mg, 500 to 600 mg enzyme protein per kg animal feed, or any combination of these intervals.

[1341] The final catalase concentration in the diet can also be determined in Units/kg feed, which is within the range of 100 to 3000 Units per kg animal feed, such as 200 to 3000 U/kg, 300 to 2000 U/kg, 100 to 800 U/kg, 100 to 400 U/kg, or any combination of these intervals.

[1342] In another embodiment, the compositions described herein optionally include one or more enzymes for improving feed digestibility. Enzymes can be classified on the basis of the handbook Enzyme Nomenclature from NC-IUBMB, 1992), see also the ENZYME site at the internet: http://www.expasy.ch/enzyme/. ENZYME is a repository of information relative to the nomenclature of enzymes. It is primarily based on the recommendations of the Nomenclature Committee of the International Union of Biochemistry and Molecular Biology (IUB-MB), Academic Press, Inc., 1992, and it describes each type of characterized enzyme for which an EC (Enzyme Commission) number has been provided (Bairoch A. The ENZYME database, 2000, Nucleic Acids Res 28:304-305). This IUB-MB Enzyme nomenclature is based on their substrate specificity and occasionally on their molecular mechanism; such a classification does not reflect the structural features of these enzymes.

[1343] Thus the composition of the invention may also comprise at least one other enzyme selected from the group comprising of acetylxylan esterase (EC 3.1.1.23), acylglycerol lipase (EC 3.1.1.72), alpha-amylase (EC 3.2.1.1), beta-amylase (EC 3.2.1.2), arabinofuranosidase (EC 3.2.1.55), cellobiohydrolases (EC 3.2.1.91), cellulase (EC 3.2.1.4), feruloyl esterase (EC 3.1.1.73), galactanase (EC 3.2.1.89), alpha-galactosidase (EC 3.2.1.22), beta-galactosidase (EC 3.2.1.23), beta-glucanase (EC 3.2.1.6), beta-glucosidase (EC 3.2.1.21), triacylglycerol lipase (EC 3.1.1.3), lysophospholipase (EC 3.1.1.5), alpha-mannosidase (EC 3.2.1.24), beta-mannosidase (mannanase) (EC 3.2.1.25), phytase (EC 3.1.3.8, EC 3.1.3.26, EC 3.1.3.72), phospholipase Al (EC 3.1.1.32), phospholipase A2 (EC 3.1.1.4), phospholipase D (EC 3.1.4.4), pullulanase (EC 3.2.1.41), pectinesterase (EC 3.1.1.11), beta-xylosidase (EC 3.2.1.37), or any combination thereof.

[1344] In another embodiment, the animal feed may include one or more vitamins, such as one or more fat-soluble vitamins and/or one or more water-soluble vitamins. In another embodiment, the animal feed may optionally include one or more minerals, such as one or more trace minerals and/or one or more macro minerals.

[1345] Usually fat- and water-soluble vitamins, as well as trace minerals form part of a so-called premix intended for addition to the feed, whereas macro minerals are usually separately added to the feed.

[1346] Non-limiting examples of fat-soluble vitamins include vitamin A, vitamin D3, vitamin E, and vitamin K, e.g., vitamin K3.

[1347] Non-limiting examples of water-soluble vitamins include vitamin C, vitamin B12, biotin and choline, vitamin Bl, vitamin B2, vitamin B6, niacin, folic acid and panthothenate, e.g., Ca-D-panthothenate.

[1348] Non-limiting examples of trace minerals include boron, cobalt, chloride, chromium, copper, fluoride, iodine, iron, manganese, molybdenum, iodine, selenium and zinc.

[1349] Non-limiting examples of macro minerals include calcium, magnesium, phosphorus, potassium and sodium.

[1350] In one embodiment, the amount of vitamins is 0.001% to 10% by weight of the composition. In one embodiment, the amount of minerals is 0.001% to 10% by weight of the composition.

[1351] The nutritional requirements of these components (exemplified with poultry and piglets/pigs) are listed in Table A of WO 01/58275. Nutritional requirement means that these components should be provided in the diet in the concentrations indicated.

[1352] In the alternative, the animal feed additive of the invention comprises at least one of the individual components specified in Table A of WO 01/58275. At least one means either of, one or more of, one, or two, or three, or four and so forth up to all thirteen, or up to all fifteen individual components. More specifically, this at least one individual component is included in the additive of the invention in such an amount as to provide an in-feed-concentration within the range indicated in column four, or column five, or column six of Table A.

[1353] In a still further embodiment, the animal feed additive of the invention comprises at least one of the below vitamins, preferably to provide an in-feed-concentration within the ranges specified in the below Table 1 (for piglet diets, and broiler diets, respectively).

[1354] In the suitable embodiments, the invention relates to an animal feed and a method of improving one or more performance parameters in an animal comprising administering to the animal an animal feed or animal feed additive comprising one or more polypeptides having catalase activity, wherein the one or more performance parameters is selected from the group consisting of the European Production Efficiency Factor (EPEF), Feed Conversion Ratio (FCR), Growth Rate (GR), Body Weight Gain (WG), Mortility Rate (MR) and Flock Uniformity (FU).

[1355] These features are supported by examples 1 2, 3, and 4. As it is generally known, an improved FCR is lower than the control FCR. In particular embodiments, the FCR is improved (i.e., reduced) as compared to the control by at least 1.0%, preferably at least 1.5%, 1.6%, 1.7 %, 1.8 %, 1.9 %, 2.0 %, 2.1%, 2.2 %, 2.3 %, 2.4 %, or at least 2.5 %.

[1356] The term “mortality” as used herein refers to the ratio of life animals at the end of the growth phase versus the number of animals originally included into the pond. It may be determined on the basis of a fish challenge trial comprising two groups of fish challenged by a particular fish pathogen with the aim to provoke a mortality of 40 to 80% of the animals in the untreated group. However, in the challenge group fed with a suitable concentration per Kg of feed of a mixture of at least two compounds according to the invention, the mortality is reduced compared to the untreated group by at least 5%, preferably at least, 10%, 15%, 20%, 25%, 30%, 35%, 40%, 45%, or at least 50%.

TABLE 1
Typical vitamin recommendations

| Vitamin | Piglet diet | Broiler diet |
|---|---|---|
| Vitamin A | 10,000-15,000 IU/kg feed | 8-12,500 IU/kg feed |
| Vitamin D3 | 1800-2000 IU/kg feed | 3000-5000 IU/kg feed |
| Vitamin E | 60-100 mg/kg feed | 150-240 mg/kg feed |
| Vitamin K3 | 2-4 mg/kg feed | 2-4 mg/kg feed |
| Vitamin B1 | 2-4 mg/kg feed | 2-3 mg/kg feed |
| Vitamin B2 | 6-10 mg/kg feed | 7-9 mg/kg feed |
| Vitamin B6 | 4-8 mg/kg feed | 3-6 mg/kg feed |
| Vitamin B12 | 0.03-0.05 mg/kg feed | 0.015-0.04 mg/kg feed |
| Niacin (Vitamin B3) | 30-50 mg/kg feed | 50-80 mg/kg feed |
| Pantothenic acid | 20-40 mg/kg feed | 10-18 mg/kg feed |
| Folic acid | 1-2 mg/kg feed | 1-2 mg/kg feed |
| Biotin | 0.15-0.4 mg/kg feed | 0.15-0.3 mg/kg feed |
| Choline chloride | 200-400 mg/kg feed | 300-600 mg/kg feed |

[1357] In some embodiments, the invention relates to an animal feed and a method of improving or enhancing immune response and/or reducing inflammation and/or for the modulation of the gut flora in an animal comprising administering to the animal an animal feed or animal feed additive comprising one or more polypeptides having superoxide dismutase activity.

[1358] These features are supported by example 1 as the first two features are very much linked to oxidative stress. Different in-vitro models tested by the applicant also show that SODs optionally in combinations with a catalase are very effective to decrease oxidative stress/burst.

[1359] Dysregulating effects of heat stress and oxidative stress also help in maintaining gut integrity and function. Therefore, the invention also supports a positive modulation of the gut flora, in particular of the microbial gut flora.

[1360] The term “gut” as used herein designates the gastrointestinal or digestive tract (also referred to as the alimentary canal) and it refers to the system of organs within multi-cellular animals which takes in food, digests it to extract energy and nutrients, and expels the remaining waste.

[1361] The term gut “microflora” as used herein refers to the natural microbial cultures residing in the gut and maintaining health by aiding in proper digestion.

[1362] The term “modulate” as used herein in connection with the gut microflora generally means to change, manipulate, alter, or adjust the function or status thereof in a healthy and normally functioning animal, i.e. a non-therapeutic use.

[1363] The term “supporting immune system function” as used herein refers to the immune stimulation effect obtained by the compounds according to the invention.

[1364] In the fifth and sixth embodiment, the invention relates to a method of reducing or eliminating the use of antibiotics administered to animal feed or to a method of reducing cellular markers of reactive oxygen species or free radicals in animal body comprising administering to the animal an animal feed or animal feed additive comprising one or more polypeptides having catalase activity. These embodiments are supported by examples 1 to 4.

[1365] In the seventh embodiment, the invention relates to an animal feed additive or animal feed premix comprising one or more polypeptides having superoxide dismutase (SOD), wherein the feed additive or premix further comprises
[1366] one or more polypeptides having catalase activity and/or
[1367] one or more vitamins, wherein the one or more vitamins is preferably a fat-soluble vitamin, for example vitamin E.

[1368] As shown in example 1, such a premix has strong antioxidative properties and can be used, optionally in combination with selenium as an antioxidant in feed and feed premixes or as a replacement or partial replacement of antibiotics in animal feed.

[1369] The protein source of the animal feed is selected from the group consisting of soybean, wild soybean, beans, lupin, tepary bean, scarlet runner bean, slimjim bean, lima bean, French bean, Broad bean (fava bean), chickpea, lentil, peanut, Spanish peanut, canola, sunflower seed, cotton seed, rapeseed (oilseed rape) or pea or in a processed form such as soybean meal, full fat soy bean meal, soy protein concentrate (SPC), fermented soybean meal (FSBM), sunflower meal, cotton seed meal, rapeseed meal, fish meal, bone meal, feather meal, whey or any combination thereof.

[1370] The energy source of the animal feed is selected from the group consisting of maize, corn, sorghum, barley, wheat, oats, rice, triticale, rye, beet, sugar beet, spinach, potato, cassava, quinoa, cabbage, switchgrass, millet, pearl millet, foxtail millet or in a processed form such as milled corn, milled maize, potato starch, cassava starch, milled sorghum, milled switchgrass, milled millet, milled foxtail millet, milled pearl millet, or any combination thereof.

[1371] In a preferred example, the animal feed further comprises one or more components selected from the list consisting of one or more additional enzymes; one or more microbes; one or more vitamins; one or more minerals; one or more amino acids; and one or more other feed ingredients, as described herein.

[1372] In a further embodiment, the invention relates to an animal feed additive or animal feed premix comprising one or more polypeptides having catalase activity, wherein the feed additive or premix further comprises
[1373] c. one or more polypeptides having superoxide dismutase activity and/or
[1374] d. one or more vitamins, wherein the one or more vitamins is preferably a fat-soluble vitamin, for example vitamin E.

[1375] A preferred example of the catalase according to the invention is a polypeptide having at least 80% sequence identity to SEQ ID NO 6 and SEQ ID NO 7, SEQ ID NO 250, and SEQ ID NO 251.

[1376] A preferred animal feed premix (animal feed additive) comprises one or more polypeptides having catalase activity, vitamin E and optionally selenium and is used as antioxidant, preferably in feed and feed premixes or as a replacement or partial replacement of antibiotics in animal feed.

[1377] Examples of commercial vitamin E and selenium are Rovimix®E50 and SePlex (DSM Nutritional Products).

### Enzyme Formulation

[1378] The polypeptide having catalase activity of the invention may be formulated as a liquid or a solid. For a liquid formulation, the formulating agent may comprise a polyol (such as e.g. glycerol, ethylene glycol or propylene glycol), a salt (such as e.g. sodium chloride, sodium benzoate, potassium sorbate) or a sugar or sugar derivative (such as e.g. dextrin, glucose, sucrose, and sorbitol). Thus, in one embodiment, the composition is a liquid composition comprising the polypeptide of the invention and one or more formulating agents selected from the list consisting of glycerol, ethylene glycol, 1,2-propylene glycol, 1,3-propylene glycol, sodium chloride, sodium benzoate, potassium sorbate, dextrin, glucose, sucrose, and sorbitol. The liquid formulation may be sprayed onto the feed after it has been pelleted or may be added to drinking water given to the animals.

[1379] In one embodiment, the liquid formulation further comprises 20%-80% polyol (i.e. total amount of polyol), preferably 25%-75% polyol, more preferably 30%-70% polyol, more preferably 35%-65% polyol or most preferably 40%-60% polyol. In one embodiment, the liquid formulation comprises 20%-80% polyol, preferably 25%-75% polyol, more preferably 30%-70% polyol, more preferably 35%-65% polyol or most preferably 40%-60% polyol wherein the polyol is selected from the group consisting of glycerol, sorbitol, propylene glycol (MPG), ethylene glycol, diethylene glycol, triethylene glycol, 1, 2-propylene glycol or 1, 3-propylene glycol, dipropylene glycol, polyethylene glycol (PEG) having an average molecular weight below about 600 and polypropylene glycol (PPG) having an average molecular weight below about 600. In one embodiment, the liquid formulation comprises 20%-80% polyol (i.e. total amount of polyol), preferably 25%-75% polyol, more preferably 30%-70% polyol, more preferably 35%-65% polyol or most preferably 40%-60% polyol wherein the polyol is selected from the group consisting of glycerol, sorbitol and propylene glycol (MPG).

[1380] In one embodiment, the liquid formulation further comprises preservative, preferably selected from the group consisting of sodium sorbate, potassium sorbate, sodium benzoate and potassion benzoate or any combination thereof. In one embodiment, the liquid formulation comprises 0.02% to 1.5% w/w preservative, more preferably 0.05% to 1.0% w/w preservative or most preferably 0.1% to 0.5% w/w preservative. In one embodiment, the liquid formulation comprises 0.001% to 2.0% w/w preservative (i.e. total amount of preservative), preferably 0.02% to 1.5% w/w preservative, more preferably 0.05% to 1.0% w/w preservative or most preferably 0.1% to 0.5% w/w preservative wherein the preservative is selected from the group consisting of sodium sorbate, potassium sorbate, sodium benzoate and potassium benzoate or any combination thereof.

[1381] For a solid formulation, the formulation may be for example as a granule, spray dried powder or agglomerate (e.g. as disclosed in WO2000/70034). The formulating agent may comprise a salt (organic or inorganic zinc, sodium, potassium or calcium salts such as e.g. such as calcium acetate, calcium benzoate, calcium carbonate, calcium chloride, calcium citrate, calcium sorbate, calcium sulfate, potassium acetate, potassium benzoate, potassium carbonate, potassium chloride, potassium citrate, potassium sorbate, potassium sulfate, sodium acetate, sodium benzoate, sodium carbonate, sodium chloride, sodium citrate, sodium sulfate, zinc acetate, zinc benzoate, zinc carbonate, zinc chloride, zinc citrate, zinc sorbate, zinc sulfate), starch or a sugar or sugar derivative (such as e.g. sucrose, dextrin, glucose, lactose, sorbitol).

[1382] In one embodiment, the composition is a solid composition, such as a spray dried composition, comprising the polypeptide having catalase activity of the invention and one or more formulating agents selected from the list consisting of sodium chloride, sodium benzoate, potassium sorbate, sodium sulfate, potassium sulfate, magnesium sulfate, sodium thiosulfate, calcium carbonate, sodium citrate, dextrin, glucose, sucrose, sorbitol, lactose, starch and cellulose. In a preferred embodiment, the formulating agent is selected from one or more of the following compounds: sodium sulfate, dextrin, cellulose, sodium thiosulfate, magnesium sulfate and calcium carbonate.

[1383] The present invention also relates to enzyme granules/particles comprising the polypeptide having catalase activity of the invention optionally combined with one or more additional enzymes. The granule is composed of a core, and optionally one or more coatings (outer layers) surrounding the core.

[1384] Typically, the granule/particle size, measured as equivalent spherical diameter (volume based average particle size), of the granule is 20-2000 μm, particularly 50-1500 μm, 100-1500 pm or 250-1200 μm.

[1385] The core can be prepared by granulating a blend of the ingredients, e.g., by a method comprising granulation techniques such as crystallization, precipitation, pan-coating, fluid bed coating, fluid bed agglomeration, rotary atomization, extrusion, prilling, spheronization, size reduction methods, drum granulation, and/or high shear granulation.

[1386] Methods for preparing the core can be found in Handbook of Powder Technology; Particle size enlargement by C. E. Capes; Volume 1; 1980; Elsevier. Preparation methods include known feed and granule formulation technologies, e.g.:

[1387] a) spray dried products, wherein a liquid enzyme-containing solution is atomized in a spray drying tower to form small droplets which during their way down the drying tower dry to form an enzyme-containing particulate material;

[1388] b) layered products, wherein the enzyme is coated as a layer around a pre-formed inert core particle, wherein an enzyme-containing solution is atomized, typically in a fluid bed apparatus wherein the pre-formed core particles are fluidized, and the enzyme-containing solution adheres to the core particles and dries up to leave a layer of dry enzyme on the surface of the core particle. Particles of a desired size can be obtained this way if a useful core particle of the desired size can be found. This type of product is described in, e.g., WO 97/23606;

[1389] c) absorbed core particles, wherein rather than coating the enzyme as a layer around the core, the enzyme is absorbed onto and/or into the surface of the core. Such a process is described in WO 97/39116.

[1390] d) extrusion or pelletized products, wherein an enzyme-containing paste is pressed to pellets or under pressure is extruded through a small opening and cut into particles which are subsequently dried. Such particles usually have a considerable size because of the material in which the extrusion opening is made (usually a plate with bore holes) sets a limit on the allowable pressure drop over the extrusion opening. Also, very high extrusion pressures when using a small opening increase heat generation in the enzyme paste, which is harmful to the enzyme;

[1391] e) prilled products, wherein an enzyme-containing powder is suspended in molten wax and the suspension is sprayed, e.g., through a rotating disk atomiser, into a cooling chamber where the droplets quickly solidify (Michael S. Showell (editor); Powdered detergents; Surfactant Science Series; 1998; vol. 71; page 140-142; Marcel Dekker). The product obtained is one wherein the enzyme is uniformly distributed throughout an inert material instead of being concentrated on its surface. Also US 4,016,040 and US 4,713,245 are documents relating to this technique;

[1392] f) mixer granulation products, wherein a liquid is added to a dry powder composition of, e.g., conventional granulating components, the enzyme being introduced either via the liquid or the powder or both. The liquid and the powder are mixed and as the moisture of the liquid is absorbed in the dry powder, the components of the dry powder will start to adhere and agglomerate and particles will build up, forming granulates comprising the enzyme. Such a process is described in US 4,106,991 and related documents EP 170360, EP 304332, EP 304331, WO 90/09440 and WO 90/09428. In a particular product of this process wherein various high-shear mixers can be used as granulators, granulates consisting of enzyme as enzyme, fillers and binders etc. are mixed with cellulose fibres to reinforce the particles to give the so-called T-granulate. Reinforced particles, being more robust, release less enzymatic dust.

[1393] g) size reduction, wherein the cores are produced by milling or crushing of larger particles, pellets, tablets, briquettes etc. containing the enzyme. The wanted core particle fraction is obtained by sieving the milled or crushed product. Over and undersized particles can be recycled. Size reduction is described in (Martin Rhodes (editor); Principles of Powder Technology; 1990; Chapter 10; John Wiley & Sons);

[1394] h) fluid bed granulation, which involves suspending particulates in an air stream and spraying a liquid onto the fluidized particles via nozzles. Particles hit by spray droplets get wetted and become tacky. The tacky particles collide with other particles and adhere to them and form a granule;

[1395] i) the cores may be subjected to drying, such as in a fluid bed drier. Other known methods for drying granules in the feed or detergent industry can be used by the skilled person. The drying preferably takes place at a product temperature of from 25 to 90° C. For some enzymes it is important the cores comprising the enzyme contain a low amount of water before coating. If water sensitive enzymes are coated before excessive water is removed, it will be trapped within the core and it may affect the activity of the enzyme negatively. After drying, the cores preferably contain 0.1-10% w/w water.

[1396] The core may include additional materials such as fillers, fibre materials (cellulose or synthetic fibres), stabilizing agents, solubilizing agents, suspension agents, viscosity regulating agents, light spheres, plasticizers, salts, lubricants and fragrances.

[1397] The core may include a binder, such as synthetic polymer, wax, fat, or carbohydrate.

[1398] The core may include a salt of a multivalent cation, a reducing agent, an antioxidant, a peroxide decomposing catalyst and/or an acidic buffer component, typically as a homogenous blend.

[1399] In one embodiment, the core comprises a material selected from the group consisting of salts (such as calcium acetate, calcium benzoate, calcium carbonate, calcium chloride, calcium citrate, calcium sorbate, calcium sulfate, potassium acetate, potassium benzoate, potassium carbonate, potassium chloride, potassium citrate, potassium sorbate, potassium sulfate, sodium acetate, sodium benzoate, sodium carbonate, sodium chloride, sodium citrate, sodium sulfate, zinc acetate, zinc benzoate, zinc carbonate, zinc chloride, zinc citrate, zinc sorbate, zinc sulfate), starch or a sugar or sugar derivative (such as e.g. sucrose, dextrin, glucose, lactose, sorbitol), sugar or sugar derivative (such as e.g. sucrose, dextrin, glucose, lactose, sorbitol), small organic molecules, starch, flour, cellulose and minerals and clay minerals (also known as hydrous aluminium phyllosilicates). In one embodiment, the core comprises a clay mineral such as kaolinite or kaolin.

[1400] The core may include an inert particle with the enzyme absorbed into it, or applied onto the surface, e.g., by fluid bed coating.

[1401] The core may have a diameter of 20-2000 μm, particularly 50-1500 μm, 100-1500 μm or 250-1200 μm.

[1402] The core may be surrounded by at least one coating, e.g., to improve the storage stability, to reduce dust formation during handling, or for coloring the granule. The optional coating(s) may include a salt and/or wax and/or flour coating, or other suitable coating materials.

[1403] The coating may be applied in an amount of at least 0.1% by weight of the core, e.g., at least 0.5%, 1% or 5%. The amount may be at most 100%, 70%, 50%, 40% or 30%.

[1404] The coating is preferably at least 0.1 μm thick, particularly at least 0.5 μm, at least 1 μm or at least 5 μm. In some embodiments the thickness of the coating is below 100 μm, such as below 60 μm, or below 40 μm.

[1405] The coating should encapsulate the core unit by forming a substantially continuous layer. A substantially continuous layer is to be understood as a coating having few or no holes, so that the core unit is encapsulated or enclosed with few or no uncoated areas. The layer or coating should in particular be homogeneous in thickness.

[1406] The coating can further contain other materials as known in the art, e.g., fillers, antisticking agents, pigments, dyes, plasticizers and/or binders, such as titanium dioxide, kaolin, calcium carbonate or talc.

[1407] The granule may comprise a core comprising the polypeptide having catalase activity of the invention, one or more salt coatings and one or more wax coatings. Examples of enzyme granules with multiple coatings are shown in WO1993/07263, WO1997/23606 and WO2016/149636.

[1408] A salt coating may comprise at least 60% by weight of a salt, e.g., at least 65%, at least 70%, at least 75%, at least 80%, at least 85%, at least 90%, at least 95% or at least 99% by weight.

[1409] The salt may be added from a salt solution where the salt is completely dissolved or from a salt suspension wherein the fine particles are less than 50 μm, such as less than 10 μm or less than 5 μm.

[1410] The salt coating may comprise a single salt or a mixture of two or more salts. The salt may be water soluble, in particular having a solubility at least 0.1 g in 100 g of water at 20° C., preferably at least 0.5 g per 100 g water, e.g., at least 1 g per 100 g water, e.g., at least 5 g per 100 g water.

[1411] The salt may be an inorganic salt, e.g., salts of sulfate, sulfite, phosphate, phosphonate, nitrate, chloride or carbonate or salts of simple organic acids (less than 10 carbon atoms, e.g., 6 or less carbon atoms) such as citrate, malonate or acetate. Examples of cations in these salts are alkali or earth alkali metal ions, the ammonium ion or metal ions of the first transition series, such as sodium, potassium, magnesium, calcium, zinc or aluminium. Examples of anions include chloride, bromide, iodide, sulfate, sulfite, bisulfite, thiosulfate, phosphate, monobasic phosphate, dibasic phosphate, hypophosphite, dihydrogen pyrophosphate, tetraborate, borate, carbonate, bicarbonate, metasilicate, citrate, malate, maleate, malonate, succinate, sorbate, lactate, formate, acetate, butyrate, propionate, benzoate, tartrate, ascorbate or gluconate. In particular alkali- or earth alkali metal salts of sulfate, sulfite, phosphate, phosphonate, nitrate, chloride or carbonate or salts of simple organic acids such as citrate, malonate or acetate may be used.

[1412] The salt in the coating may have a constant humidity at 20° C. above 60%, particularly above 70%, above 80% or above 85%, or it may be another hydrate form of such a salt (e.g., anhydrate). The salt coating may be as described in WO1997/05245, WO1998/54980, WO1998/55599, WO2000/70034, WO2006/034710, WO2008/017661, WO2008/017659, WO2000/020569, WO2001/004279, WO1997/05245, WO2000/01793, WO2003/059086, WO2003/059087, WO2007/031483, WO2007/031485, WO2007/044968, WO2013/192043, WO2014/014647 and WO2015/197719 or polymer coating such as described in WO 2001/00042.

[1413] Specific examples of suitable salts are NaCl (CH20° C.=76%), Na2CO3 (CH20° C.=92%), NaNO3 (CH20° C.=73%), Na2HPO4 (CH20° C.=95%), Na3PO4 (CH25° C.=92%), NH4Cl (CH20° C.=79.5%), (NH4)2HPO4 (CH20° C.=93,0%), NH4H2PO4 (CH20° C.=93.1%), (NH4)2504 (CH20° C.=81.1%), KCl (CH20° C.=85%), K2HPO4 (CH20° C.=92%), KH2PO4 (CH20° C.=96.5%), KNO3 (CH20° C.=93.5%), Na2SO4 (CH20° C.=93%), K2SO4 (CH20° C.=98%), KHSO4 (CH20° C.=86%), MgSO4 (CH20° C.=90%), ZnSO4 (CH20° C.=90%) and sodium citrate (CH25° C.=86%). Other examples include NaH2PO4, (NH4)H2PO4, CuSO4, Mg(NO3)2, magnesium acetate, calcium acetate, calcium benzoate, calcium carbonate, calcium chloride, calcium citrate, calcium sorbate, calcium sulfate, potassium acetate, potassium benzoate, potassium carbonate, potassium chloride, potassium citrate, potassium sorbate, sodium acetate, sodium benzoate, sodium citrate, sodium sulfate, zinc acetate, zinc benzoate, zinc carbonate, zinc chloride, zinc citrate and zinc sorbate.

[1414] The salt may be in anhydrous form, or it may be a hydrated salt, i.e. a crystalline salt hydrate with bound water(s) of crystallization, such as described in WO 99/32595. Specific examples include anhydrous sodium sulfate (Na2SO4), anhydrous magnesium sulfate (MgSO4), magnesium sulfate heptahydrate (MgSO4.7H2O), zinc sulfate heptahydrate (ZnSO4.7H2O), sodium phosphate dibasic heptahydrate (Na2HPO4.7H2O), magnesium nitrate hexahydrate (Mg(NO3)2(6H2O)), sodium citrate dihydrate and magnesium acetate tetrahydrate.

[1415] Preferably the salt is applied as a solution of the salt, e.g., using a fluid bed.

[1416] A wax coating may comprise at least 60% by weight of a wax, e.g., at least 65%, at least 70%, at least 75%, at least 80%, at least 85%, at least 90%, at least 95% or at least 99% by weight.

[1417] Specific examples of waxes are polyethylene glycols; polypropylenes; Carnauba wax; Candelilla wax; bees wax; hydrogenated plant oil or animal tallow such as polyethylene glycol (PEG), methyl hydroxy-propyl cellulose (MHPC), polyvinyl alcohol (PVA), hydrogenated ox tallow, hydrogenated palm oil, hydrogenated cotton seeds and/or hydrogenated soy bean oil; fatty acid alcohols; mono-glycerides and/or di-glycerides, such as glyceryl stearate, wherein stearate is a mixture of stearic and palmitic acid; micro-crystalline wax; paraffin's; and fatty acids, such as hydrogenated linear long chained fatty acids and derivatives thereof. A preferred wax is palm oil or hydrogenated palm oil.

[1418] Non-dusting granulates may be produced, e.g., as disclosed in U.S. Patent Nos. 4,106,991 and 4,661,452 and may optionally be coated by methods known in the art. The coating materials can be waxy coating materials and film-forming coating materials. Examples of waxy coating materials are poly(ethylene oxide) products (polyethyleneglycol, PEG) with mean molar weights of 1000 to 20000; ethoxylated nonylphenols having from 16 to 50 ethylene oxide units; ethoxylated fatty alcohols in which the alcohol contains from 12 to 20 carbon atoms and in which there are 15 to 80 ethylene oxide units; fatty alcohols; fatty acids; and mono- and di- and triglycerides of fatty acids. Examples of film-forming coating materials suitable for application by fluid bed techniques are given in GB 1483591.

[1419] The granulate may further comprise one or more additional enzymes. Each enzyme will then be present in more granules securing a more uniform distribution of the enzymes, and also reduces the physical segregation of different enzymes due to different particle sizes. Methods for producing multi-enzyme co-granulates is disclosed in the ip.com disclosure IPCOM000200739D.

### EXAMPLES

### Example 1

### Heat Stress Model in Broilers: SOD and CAT Reduce Oxidative Stress Response

### Background

[1420] Different stress factors inevitably influence the animal's physiology and performance with varying degrees during the production period. High ambient temperature is one of the most common stressor in modern poultry production resulting in reduced feed intake, body weight gain, and increased mortality. Because of their physiological state and greater metabolic activity, broilers are more susceptible to temperature -associated environmental challenges. In addition to its effect on bird performance, the adverse effects of heat stress can range from minimal discomfort to multi-organ damage and failure, including alteration of gut permeability and function due to weakened tight junctions of the epithelial layer. Therefore, heat stress-induced disturbance of gut integrity may lead to leaky gut syndrome thus increasing the susceptibility of birds to enteric pathogens that may lead to systemic bacterial infections. Moreover, heat stress can cause oxidative damage by increasing the formation of reactive oxygen species.

### Hypothesis and Objective

[1421] The central hypothesis is that the adverse effects of heat stress on performance and health of chickens can be mitigated by incorporating effective feed additives into poultry diets. Certain compounds that can alter the dysregulating effects of heat stress may help in maintaining gut integrity and function. Therefore, the main objective is to alleviate the impact of heat stress challenge on performance and overall health of broilers by timely supplementation of non-drug dietary additives.

Experimental design

[1422] A 35-day trial with only male broiler chicks will be run in floor pens with eight replicate pens per treatment and 20 birds/pen. Birds are randomly assigned to treatment groups in a 2 x 4 factorial arrangement that includes heat stress (optimal or high heat) and dietary treatments (basal diet or feed additives) as per FIG. 1. A total of 4 animal rooms are used (2 controls and 2 heat stress) each housing half the replicate pens (n=4) per group.

[1423] Three birds per pen for each of the three sampling times (3 x 3=9) are randomly tagged at placement with necktags of different colour (or number) per sampling time to ensure random sampling. At sampling, the two of the three birds with the closest to average BW are selected for sampling and their BW is recorded. If less than two of those birds are available or healthy, other random birds can be selected in the pen to complete the two sampled birds. Treatment groups including controls and challenge from d 28 to 35 (heat stress) are as follows:

TABLE 2
Treatment groups

| | | Heat Stress |
|---|---|---|
| | | Challenge |
| Treatment | Description | d28-35 |
| 1. NC | Negative Control (NC) = basal | — |
| | diets (corn/soy) | |
| 2. VitE + Se | NC +Vit E + Se (d 0-35) | — |
| 3. Mix Low | NC + SOD SEQ:ID 1, 500 U/kg + | — |
| | CAT SEQ ID:7 .100 U/kg (d 0-35) | |
| 4. Mix High | NC + SOD SEQ:ID 1 500 U/kg + | — |
| | CAT SEQ ID:7, 500 U/kg (d 0-35) | |
| 5. PC | Positive Control: NC + heat stress d 28-35 | +++ |
| 6. VitE + Se | PC + Vit E + Se (d 0-35) | +++ |
| 7. Mix Low | PC + SOD SEQ ID 1, 500 U/kg + | +++ |
| | CAT SEQ ID:7, 100 U/kg (d 0-35) | |
| 8. Mix High | PC + SOD SEQ:ID 1, 500 U/kg +30 | +++ |
| | CAT SEQ ID:7, 500 U/kg (d 0-35) | |

*PC: Vit E—250mg/kg; SePlex—1mg/kg
**NC; Vit E—10mg/kg; SePlex —0.14mg/kg

TABLE 3
Treatment identification and doses

| Treatment | Application |
|---|---|
| VitE + Se | Dry, applied in mixer |
| | Vitamin E: 250 mg/kg (ROVIMIX ® E50) |
| | Selenium: 1 mg Se/kg (Sel-Plex ®) |
| Mix Low | Liquid, gently mix the products with distilled |
| | water to complete a total of 1,000 ml/MT |
| | (100 ml/100 kg feed) immediately before |
| | application, and spray uniformly into the mixer, |
| | directly into the feed with a micro-fluid nozzle |
| | applicator |
| | SOD: 80 ml/MT (8 ml/100 kg) |
| | CAT: 4 ml/MT (0.4 ml/100 kg) |
| Mix High | Liquid, gently mix the products with distilled |
| | water to complete a total of 1,000 ml/MT |
| | (100 ml/100 kg feed) immediately before |
| | application, and spray uniformly into the mixer, |
| | directly into the feed with a micro-fluid nozzle |
| | applicator |
| | SOD: 80 ml/MT (8 ml/100 kg) |
| | CAT: 20 ml/MT (2 ml/100 kg) |

### Handling of Products

[1424] Store refrigerated at 4 C.
[1425] Gently mix before applying.
[1426] Use industrial protective equipment for handling: gloves, mask, googles, and coat.
[1427] Mix with distilled water at room temperature to complete 1,000 ml/MT immediately before application, and spray uniformly in the mixer, directly into the feed with a micro-fluid nozzle applicator.

### Heat Stress Protocol

[1428] Heat stress protocol is performed as planned during the finisher feeding phase (d 28 to d 35). For the heat stress groups, temperature is maintained at 35±1° C. (10° C. above the recommended temp.) and applied once daily from 10 am to 2 μm, then reduced again to 25 C +/−1 for the remainder of the day. Relative humidity is monitored and maintained at RH <50%. Birds in the separate ‘optimal heat’ group are kept under normal constant recommended temperatures (25° C. +/−1). The birds' (2 birds/pen) rectal temperature was monitored daily with a rectal probe during the heat stress period (d 28-35).

### Feed

[1429] The diets consist of corn/soybean in mash as Starter (d 1-21) and Grower (d 22-35) and will be formulated according to commercial specifications for the broilers used (Ross or Cobb) to meet or exceed NRC recommendations (Table 4). Test products are sprayed onto a small amount (20 kg) of the basal diet and mixed with the rest of the batch for each diet.

Basal diet formulation for Starter and Grower phases.

| | Basal Diet | |
|---|---|---|
| Ingredient, g/kg | 0-21 d | 22-35 d |
| Corn | 558.80 | 618.20 |
| Soybean meal, CP 48% | 360.00 | 297.00 |
| Vegetable oil | 40.00 | 52.00 |
| Limestone | 5.00 | 4.00 |
| Dicalcium phosphate | 24.00 | 19.00 |
| DL-Methionine (98%) | 3.20 | 2.00 |
| L-Lysine HCI (78%) | 2.80 | 2.00 |
| L-Threonine | 1.30 | 0.80 |
| Salt | 2.50 | 2.50 |
| Vitamin premix¹ | 1.00 | 1.00 |
| Mineral premix² | 1.00 | 1.00 |
| Cholin chloride | 0.50 | 0.50 |
| Total | 1000 | 1000 |
| Chemical composition (Calculated) | | |
| Dry Matter, % | 87.95 | 87.90 |
| Crude Protein, % | 22.25 | 19.50 |
| AMEₙ, kcal/kg | 3060 | 3205 |
| Lysine, % | 1.39 | 1.15 |
| Dig. Lysine, % | 1.23 | 1.02 |
| Methionine + cysteine, % | 1.00 | 0.82 |
| Dig. Methionine + cysteine, % | 0.90 | 0.71 |
| Threonine, % | 0.94 | 0.80 |
| Dig. Threonine, % | 0.81 | 0.68 |
| Calcium, % | 0.96 | 0.78 |
| Available phosphorus, % | 0.47 | 0.39 |

^{1,2}Appended separately. Premix delivers 0.14 mg Se/kg, and 10 mg Vit E/kg

### Parameters Evaluated

[1430] 1. Performance: Standard performance parameters including body weight (BW), weight gains (BWG), feed intake (FI), and feed conversion ratios (FCR) are evaluated on days 10, 21, 27, and 35 on a per pen basis. Any mortality is recorded daily and feed consumption (+FCR) corrected for accordingly. Average bird performance is calculated based on the number of birds per each pen (i.e. replicate) after adjusting for any mortality.
[1431] 2. Rectal temperature: The birds' rectal temperature is monitored daily during the heat stress period (d 28-35). Two birds from each replicate pen are selected and tagged for body temperature measurement using a rectal probe daily at a pre-set time range (e.g. 1-2 μm).
[1432] 3. Antioxidant parameters: Based on the stress challenge employed, blood serum and liver are sampled at 27, 28 and 35 d from two birds of average BW per pen to determine parameters related to oxidative stress:
   [1433] a. MDA, CAT, GSH-Px, and SOD: On d 27, two birds per replicate pen are tagged for blood sampling. Blood samples are taken by wing venipuncture on d 27, d 28, and d 35 (alternating sides), and collected into red-topped serum tubes. The tubes are transferred to the main lab and centrifuged at 2,000 x g for 5 min to collect sera, which are stored at -20° C. until analysis. Antioxidant analyses in blood samples are carried out with commercial kits according to the manufacturer recommendations.
   [1434] b. Optional analyses. Depending on the results of the other parameters, it might be decided to measure Vitamin E, vitamin A, cysteine, cystine, methionine, and glutamine in the liver, using standard HPLC protocols are used to measure vitamins A and E, as well as profile amino acids (separated on a single column). They are not included in the initial budget.
[1435] 4. Liver bacterial load: At the end of the study (d 35), liver samples are collected from one bird per pen in sterile sampling bags to determine total bacterial load in liver. To establish standard curves for bacterial quantification, pure bacterial (E. coli, and Clostridium perfringens) suspensions are individually cultured in corresponding selective media, the DNA extracted (commercial extraction kits), and its concentration determined (Nano-Drop). The DNA stocks are serially diluted (6 times) and real time quantitative PCR performed to determine the threshold cycle (Ct) value related to each pure sample. The standard curves are established with the DNA concentrations and corresponding relative Ct values. DNA from liver tissue samples are extracted via special kits. The abundance of DNA copies in DNA samples from liver tissue is determined by qPCR. For this purpose, specific primers for bacterial 16S rRNA gene are used, and the bacterial loads per gram tissue are calculated using the generated standard curves.
[1436] 5. Carcass/body composition (no additional cost): Dual Energy X-Ray Absorptiometry (DXA) analysis is performed on 3 birds per pen on d 35 to assess the effects of products on various measurements of carcass/body composition. These include body fat percentage, fat tissue, lean tissue, and bone mineral density (BMD), in addition to bone mineral content (BMC) and carcass area, both used for calculation purposes.
[1437] 6. Gene expression: Liver and intestinal (jejunum) tissue samples are taken (2/pen) on d 27, d 28 and d 35 from birds with average pen weight (sampled above for histology). Liver weight is measured and relative weight calculated per bird. Tissues are collected, minced, snap-frozen, and stored at −80° C. until qPCR analysis. Target genes to be measured include immunity-related to heat stress (oxidative stress, heat shock proteins, inflammatory markers), tight junction genes, host defense peptides, and nutrient transporters. The final list of targets is determined based on study outcome. Transcript analysis for a subset of targets is measured in each collected tissue.

### Heat Stress Protocol

[1438] Heat stress protocol was performed as planned during the last week of the experiment (d 28 to d 35). For the heat stress groups, temperature was raised and maintained at 35±1 ° C. (10 ° C. above the recommended temp.) and applied once daily from 10am to 2 μm, then reduced again to 25 ° C. +/−1 for the remainder of the day. Relative humidity was monitored and maintained at RH <50%. Birds in the separate ‘optimal heat’ group were kept under normal constant recommended temperatures (25 ° C. +/−1). The birds' (2 birds/pen) rectal temperature was monitored daily with a rectal probe during the heat stress period (d 28-35).

### Sampling Procedures

[1439] Blood, liver and intestinal (jejunum) tissue samples were taken on d 27 (1/pen), d 28 (2/pen) and d 35 (2/pen) from birds with average pen weight for qPCR and antioxidant assay analyses. The livers were weighed and observed for any pathological findings.

### DXA Analysis

[1440] Dual Energy X-Ray Absorptiometry (DXA) analysis was performed on 2 birds per pen on d 35 to assess various measurements of carcass/body composition. Birds were individually wing-banded, sacrificed by cervical dislocation and subsequently defeathered and carcasses stored at −20° C. until DXA analysis. Birds were thawed and 10 birds were scanned at a time using GE Healthcare Lunar Prodigy Advance, System ID PA+130,744 (GE, Madison, Wis.).

### Total RNA Extraction and Reverse Transcription

[1441] Total RNA was extracted from individual liver and intestinal tissues using the Direct-zol RNA Kits (Zymo Research) according to the manufacturer's recommendations. Tissue samples were removed from -80° C. and placed on ice. A 20-30 mg aliquot of each sample was weighed, placed into a 2-mL microcentrifuge tube, and kept on ice until homogenization. Total RNA concentration was determined at optical density (OD) of 260 (NanoDrop-1000, Thermo Fisher Scientific, Waltham, MA), and RNA purity was verified by evaluating the 260/280 OD ratios. Total RNA was diluted to 0.2 μg/pL in nuclease-free water. Reverse transcription was accomplished using the high capacity cDNA Reverse Transcription kit (Applied Biosystems, Carlsbad, Calif.) following the manufacturer's protocol and the cDNA was stored at −20° C.

### Quantitative Real-Time PCR

[1442] Quantitative real-time PCR (qRT-PCR) was performed using an ABI 7500 Fast Real-Time PCR System (Applied Biosystems). The cDNA was diluted 1:20 in nuclease-free water, and 1 μL of the diluted cDNA was added to each well of a 96-well plate. Next, 9 μL of RT-PCR master mix containing 5 μL of Fast SYBR Green Master Mix (Applied Biosystems), 0.5 μL each of 2 μM forward and reverse primers, and 3 μL of sterile nuclease-free water per reaction were added to each well for a final volume of 10 μL. During the PCR reaction, samples were subjected to an initial denaturation phase of 95° C. for 20 s followed by 40 cycles of denaturation at 95° C. for 3 s and annealing and extension at 60° C. for 30 s. Gene expression was analyzed using glyceraldehyde-3-phosphate dehydrogenase (GAPDH) as an endogenous control. Each reaction was run in duplicate. Results from qRT-PCR were analyzed using the 7500 Real-Time PCR software (Applied Biosystems). The primer pairs used are shown in Table 4. Average gene expression relative to the GAPDH endogenous control for each sample was calculated using the 2^{-ΔΔCt} method (Livak and Schmittgen, 2001).

### Antioxidant Analysis

[1443] Based on the stress challenge employed, blood serum and liver samples were analyzed to determine thiobarbituric acid reactive substances (TBARS), catalase (CAT), glutathione peroxidase (GPx), and superoxide dismutase (SOD) activities on d 27, d 28 and d 35. Antioxidant analyses were carried out with commercial assay kits (Cayman, Ann Arbor, Mich.).

### Statistical Analysis

[1444] Data were subjected to a 2-way ANOVA using the GLM procedure of JMP (Pro13). The models included heat stress (optimal and high heat) and dietary treatments (basal diet or feed additives) as the main factors, and the 2-way interactions. Post hoc testing was only carried out for significant interactions and was performed using simple effect analysis. The probability P<0.05 was considered significant unless otherwise noted.

TABLE 5
Primer sequences for qPCR analysis.

| Target Gene | Forward | Reverse |
|---|---|---|
| Intestinal tissue: | | |
| Occludin | TCATCGCCTCCATCGTCTAC | TCTTACTGCGCGTCTTCTGG |
| ZO-1 | TGTAGCCACAGCAAGAGGTG | CTGGAATGGCTCCTTGTGGT |
| Muc-2 | CAGCACCAACTTCTCAGTTC | TCTGCAGCCACACATTCTTT |
| TFF-2 | TGGTCCCCCAGGAATCTCA | CACCGACGCATTGAAGCA |
| PepT1 | CCCCTGAGGAGGATCACTGTT | CAAAAGAGCAGCAGCAACGA |
| SI | CGCAAAAGCACAGGGACAGT | TCGATACGTGGTGTGCTCAGTT |
| IAP | GAGCCTACACCAGCATCCTC | GCTGCCTGTAGTCCTTGTCC |
| NaPi-IIb | GAAAGTGGTGAAGATGCC | AAGTATGAGACCGATGGC |
| SGLT-1 | GGGACAGTAGGTGGATTCTTTCTG | CACCAATCGGCCACCAA |
| Liver: | | |
| CAT | TGAAGCGGTGGCAAAGC | GCCAGCACCAGTGGTCAAG |
| GSH-Px | TTGTAAACATCAGGGGCAAA | TGGGCCAAGATCTTTCTGTAA |
| SOD | AGGGGGTCATCCACTTCC | CCCATTTGTGTTGTCTCCAA |
| GST | GCCTGACTTCAGTCCTTGGT | CCACCGAATTGACTCCATCT |
| Intestine & liver: | | |
| IL-1β | CACAGAGATGGCGTTCGTTC | GCAGATTGTGAGCATTGGGC |
| IL-4 | GCTCTCAGTGCCGCTGATG | GAAACCTCTCCCTGGATGTCAT |
| IL-6 | TTCGACGAGGCAAGGAACC | AGGTCTGAAAGGCGAACAGG |
| IL-10 | GCTCTCCTTCCACCGAAACC | GGAGCAAAGCCATCAAGCAG |
| TLR-2 | GCGAGCCCCCACGAA | GGAGTCGTTCTCACTGTAGGAGACA |
| TLR-4 | TCCGTGCCTGGAGGTAAGT | TGCCTTGGTAACAGCCTTGA |
| LITAF | TGTTCTATGACCGCCCAGTTC | AGACGTGTCACGATCATCTGGTTA |
| iNOS | CCTGTACTGAAGGTGGCTATTGG | AGGCCTGTGAGAGTGTGCAA |
| IFN-Y | GCATCTCCTCTGAGACTGGC | GCTCTCGGTGTGACCTTTGT |
| HSP70 | CATCAAGCGTAACACCACCATTCC | CCAGCAAGTTGTTGTCCTTTGTCATA |
| HSP90AA1 | AGAAAAGGTTGTTGTGTCCAATCGC | CAGCCTCTGCCTTCTGCCTCA |
| Lysozyme | GAAGCGTCACGGACTTGATAACTA | CCCATCGGTGTTACGGTTTG |
| Housekeeping | House Keeping genes | |
| β-actin | CAACACAGTGCTGTCTGGTGGTA | ATCGTACTCCTGCTTGCTGATCC |
| GAPDH | CCTAGGATACACAGAGGACCAGGTT | GGTGGAGGAATGGCTGTCA |

*Not including host defense peptides.

TABLE 6
Sampling schedule

| Time point | #of birds | Samples | Analyses |
|---|---|---|---|
| 27d, 28d | 128/day | Blood serum | Antioxidant parameters |
| and 35 d; | (2 birds per | Liver | Antioxidant parameters, |
| start at 2pm | pen) | | gene expression |
| | | | (oxidative, immune genes); |
| | | | bacterial load at d 35 |
| | | Jejunal | gene expression (oxidative, |
| | | mucosa | immune, nutritional, |
| | | | gut integrity genes) |

### Results

[1445] Experimental results are shown in FIGS. 1 to 15 and can be summarized as follows:

### Performance Parameter:

[1446] Performance parameter are shown in

[1447] FIG. 1: BWG, d 0-35

[1448] FIG. 2: FCR, d 0-35

[1449] FIG. 3: Mortality, d 0-35

[1450] FIG. 4: BWG 27-35d

[1451] FIG. 5: FCR 27-35d

[1452] FIG. 6: Mortality 27-35d

[1453] FIG. 7: BWG 0-7 d

[1454] FIG. 8: FCR 0-7d
[1455] There was an effect of SOD 400+CAT 100 on BW gain and feed intake in the overall period.
[1456] A high performance effect of enzymes on BWG and FCR was present in the first week. As reported in FIGS. 7 & 8, body weight gain (BWG) and feed conversion ratio (FCR) were improved in birds fed the diets containing either Pro. Low (T3&T7) or Pro. High (T4&T8) compared to birds fed the control diet.
[1457] Feed intake (FI) and mortality were not affected among the treatment groups during the first week (d 0-7). In particular, a numeric reductions in mortality during heat stress and over the entire trial could be observed.
[1458] Birds fed the diets containing Vit E+Se, Pro. Low, and Pro. High had higher Feed intake compared to the control group and also tended to have higher BWG between d 7-14. Similarly, BW and Fl were higher in birds fed those diets containing Vit E+Se, Pro. Low, and Pro. High between d 0-14.
[1459] Birds fed antioxidant enzymes or Vit E & Se did not perform better during heat stress. However, numerically there was less mortality in birds fed antioxidants (enzymes or Vit E& Se) compared to the control during HS.

[1460] The data presented above show that an animal feed additive comprising at least one or more polypeptides according to the present invention improves one or more performance parameters selected from the group consisting of
[1461] Feed Conversion Ratio (FCR),
[1462] Growth Rate (GR), Body Weight Gain (WG),
[1463] Mortality Rate (MR).

### Other Parameters:

[1464] With respect to markers for oxidative and cellular stress and immune function a significant interaction was observed in the HSP90 gene expression between dietary and heat stress treatments. In particular, the heat challenge significantly upregulated the expression of GPx, SOD, HSP70, HSP90, and TLR4, and downregulated that of GST, IL-10, TNFa, and IFNy in the liver on d 27/28.

[1465] A) Liver Gene Expression

[1466] The dietary treatments had significant increase in liver GPx (pre-heat stress) with the lowest doses of enzymes (FIG. 9—liver GPx, nmol/min/mL (measured day 27))

[1467] B) Measurement of heat shock proteins (HSP), which are indicators of cellular stress.

With respect to HSP
[1468] a significant reduction of jejunum gene expression of HSP70 (FIG. 10—(day 28)) and liver gene expression of HSP70 (FIG. 11—(day 35)) during heat stress at the lowest dose of enzymes and
[1469] a numeric reduction in liver gene expression of HSP90 during heat stress was observed.

[1470] C) Immune function.

[1471] The enzyme according to the present invention also show a positive effect on immune function. The treatments show a significant reduction of liver iNOS prior to heat stress challenge (FIG. 12—liver iNOS (mediator of inflammation) pre-heat stress (d 27)) or TLR2, IL-1 B, IL-10, TNFa, and INFy (FIG. 13—liver gene expression of IL-10 (anti-inflammatory) during heat stress (d 35); FIG. 14—liver gene expression of TNF alpha (pro-inflammatory) during heat stress (d 35); FIG. 15—liver gene expression of INF gamma (pro-inflammatory) during heat stress (d 35)).

[1472] The results on all these other parameters clearly show that the enzymes according to the present invention help
[1473] to reduce
   [1474] heat-, cold-, nutritional- and oxidative stress,
   [1475] cellular markers of reactive oxygen species or free radicals,
   [1476] inflammation and
[1477] to improve or enhance immune response in the animal.

### Example 2

### Nutritional Model in Piglets

[1478] Experimental Unit: Slatted Floor Pens, 4 piglets per pen (2 barrows & 2 gilts per pen)

[1479] Feed Type: Starter (Day 0-21) and Grower (Day 21-42). MASH feed is employed, using a corn-soybean type commercial ration formulation with an increase of 5-6% crude protein compared to normal commercial rations. Test material is added to the feed beginning on Day 0 and continuing through Day 42.

TABLE 7
Treatments (Days 0-42)

| | SOD (U/kg) | CAT (U/kg) |
|---|---|---|
| Treatments | SEQ ID NO: 1 | SEQ ID NO: 7 |
| Positive Control (PC)* | 0 | 0 |
| Negative Control (NC, 22% CP) | 0 | 0 |
| NC + Low SOD | 500 | 0 |
| NC + High SOD | 2500 | 0 |
| NC + Low CAT | 0 | 100 |
| NC + High CAT | 0 | 500 |
| NC + Low SOD + Low CAT | 500 | 100 |
| NC + Low SOD + High CAT | 500 | 500 |

*PC: Avilamycin at 90.7 g/lb

[1480] 12 replicates per treatment with 4 piglets (2 barrows+2 gilts) per replicate
[1481] Weaning age 21 d

[1482] Replication/piglets per treatment: Treatments 1-8 fed to 12 replicates each of 4 piglets (2 barrows +2 gilts) per replicate.

TABLE 8
Test measurements

| Data/Sample | | | |
|---|---|---|---|
| Collected | When | Description | Measurements |
| Growth | Day 0, | Individual body weights (0, 21, | FI, BW, BWG |
| performance | 21, and | and 42 days) and Feed Intake | to calculate |
| | 42 | (Days 0-21 and 21-42) | adjusted FCR |

[1483] Piglet Source: Piglets (post-weaned, at 21 days of age, called Day 0) are collected in early am (day of placement or Day 0), weighed (2 barrows & 2 gilts per pen), and assigned to each experimental pen. Each piglet is weighed individually and assigned to a pen, with very high and very low body weights excluded from the study. After all piglets are assigned to a pen, the body weights are checked to ensure no treatment is more than 1 standard deviation from another treatment.

[1484] The basal diet is shown in FIG. 16.

[1485] Experimental results on FCR (d 0-42) are shown in FIG. 17:
[1486] There was significant difference observed in growth performance between positive and negative control.
[1487] Combining SOD & CAT or feeding CAT and SOD alone gave similar performance to the antibiotic treatment and significantly better than NC.

### Example 3

### Efficacy of Antioxidant Enzymes (SOD and CAT) Supplemented at Different Doses Alone or in Combination on the Growth Performance of Early Weaned Piglet

### Summary

[1488] The effect of antioxidant enzymes (SOD and CAT) alone at different doses and in combination on the growth performance of early weaned piglets was evaluated in a trial run. A total of eight treatments were tested during the study: 6 test groups: SOD (Product A, SEQ ID No. 1 at 1250 and 2500 U/kg), CAT (Product B, SEQ ID NO 7 and Product C, SEQ ID NO 250 at 100 U/kg) and 2 combinations (A 500 U/kg+B 100 U/kg; and A 500 U/kg+B 100 U/kg); were compared against a Positive Control feed (fed with Avilamycin at 90.7 g/lb) and a Negative Control (standard ration). Each of treatments contained 12 replicates per treatment randomly assigned and containing 5 male piglets per replicate for a total number of 480 animals on study. Piglets were randomly assigned to treatments on Trial Day 0 (post-weaning at 21 days of age). At 42 days of age, live performance (growth weight gain and feed conversion) was determined. All rations were formulated with an increase of approximately 5-6% additional crude protein above normal commercial levels. Blood samples were collected at day 0, 14 and 42 to evaluate oxidative stress parameters at DSM. Gut tissue samples at the duodenum and ileum to evaluate gene expression linked to oxidative stress, and intestinal content (ileum and caecum), to study the microbiome population, were collected from 12 animals at the beginning of the trial (baseline) and one animal per pen (12 piglets x 8 treatments) at day 14 and at day 42.

[1489] For the entire grow-out period (Days 0-42), body weight gain showed significant improvement over the Negative Control group when piglets were fed diets containing 2000 U/kg of SOD (Product A), 100 U/kg of CAT B, and both combination of 400 U/kg of SOD (Product A) with 100 U/kg of both CAT products B & C, with the greatest improvements coming with the combination of 400 U/kg of SOD with 100 U/kg of CAT B, which also performed statistically similar to the Positive Control ration that contained Avilamycin at 90.7 g/lb. Feed conversion improved significantly between Positive Control and Negative Control.

### Test System

[1490] The commercial-simulated test model employed in this study used piglets reared under a normal swine industry Starter diet (Trial Day 0-21) and Grower diet (Trial Day 21-42), reared on slatted floors. Ration formulations were conducted via computer-generated linear regression program that simulates formulations conducted during practical swine production techniques. Treatments were tested in male piglets. Piglets were continuously fed their experimental diets from time of placement on Trial Day 0 to Trial Day 42.

TABLE 9
Treatments

| Treatment | | | |
|---|---|---|---|
| Number (T) | Treatment Description | Dose inclusion | |
| 1 | Neg. control | — | |
| 2 | PC: Avylamycin | 90.7 | g/lb |
| 3 | NC + Product A | A = 1000 | U/kg |
| 4 | NC + Product A | A = 2000 | U/kg |
| 5 | NC + Product B | B = 100 | U/kg |
| 6 | NC + Product C | C = 100 | U/kg |
| 7 | NC + Product A + | A = 400 | U/kg |
| | Product B | B = 100 | U/kg |
| 8 | NC + Product A + | A = 400 | U/kg |
| | Product C | C = 100 | U/kg |

[1491] Piglets were weighed and randomly placed into each pen on Trial Day 0 and fed their respective diets. Each pen had sufficient floor density, feeder and waterer space for each grow-out area for the piglets. Following 42 days of grow-out, piglets were weighed, feed consumption determined, and feed conversion (feed consumed/body weight) calculated.

[1492] Materials and Methods

[1493] Experimental Design

[1494] A total of 500 male piglets (a sufficient number to ensure availability of at least 480 healthy male piglets for the conduct of the study) were obtained from a swine breeder on Trial Day 0 (upon weaning, when the piglets were 21 days of age). Piglets were fed their respective treatment feed ad libitum from Trial Day 0 to Trial Day 42.

### Housing and Daily Observations

[1495] Each experimental test unit of swine pens was housed in separated pens, located in a room containing forced air heaters with a cross-house ventilation system. Piglets were placed in a 6 ft x 6 ft pen floor area with a minimum of 9.0 ft² per piglet (without feeder and waterer space) provided. At least two nipple drinkers per pen (via well water) provided water. Piglets were observed daily for overall health, behavior and/or evidence of toxicity, and environmental conditions. Temperature in the test facility was checked daily. Drinking water and feed were confirmed to be provided ad libitum. No type of medication (other than test material) was administered during the entire feeding period.

### Data and Observations

[1496] Live performance body weights and feed intakes were collected on Days 0, 14, 21, and 42 during the growing period. Weight gain, feed intake, feed:gain ratio (feed efficiency) were calculated for 0-42 days of age between weaning and Trial Day 42. Differences between piglets fed control and test groups were statistically evaluated at P<0.05 in a typical ANOVA analysis of variance test model, employing Treatment x Replicate RCB (Randomized Complete Block). Control group was considered to be the following: Treatment 2, containing Avilamycin at 90.7 g/lb.

[1497] At the end of the study, all piglets were humanely euthanized and were disposed of according to local regulations via on-farm composting techniques.

### Diet and Water Administration

[1498] Diets were fed in two feed phases: Starter diet (0-21 days of age) and Grower diet (21-42 days of age). All diets were offered ad libitum, without restriction. Fresh well water (from the research facility deep well) was provided ad libitum.

TABLE 10
Feed Formulation Parameters

| | Starter (PC) | Grower (PC) |
|---|---|---|
| Nutrient | 0-21 days | 21-42 days |
| Metabolizable Energy (kcal/kg) | 3150 | 3200 |
| Metabolizable Energy (kcal/#) | 1425 | 1450 |
| Protein (%) | 22.000 | 20.000 |
| Lysine (%) | 1.200 | 1.052 |
| Methionine + Cystine (%) | 0.800 | 0.700 |
| Total Phosphorus (%) Min | 0.941 | 0.819 |
| Available Phosphorus (%) | 0.650 | 0.550 |
| Total Calcium (%) | 0.750 | 0.650 |
| Dietary Sodium (%) | 0.200 | 0.180 |
| Dietary Choline (g/kg) | 1.305 | 1.211 |

### Results

[1499] For the entire grow-out period (Days 0-42), body weight gain (FIG. 18) showed significant improvement over the Negative Control group (no added test materials) when piglets were fed diets containing 2000 U/kg of Product A, 100 U/kg of Product B, and a combination of 400 U/kg of Product A with 100 U/kg of both Product B and Product C, with the greatest improvements coming with the combination of 400 U/kg of Product A with 100 U/kg of Product B, which also performed statistically similar to the Positive Control ration that contained Avilamycin at 90.7 g/lb. As shown in FIG. 19, feed conversion improved between Treatment 2 (Positive Control) and Treatment 1 (Negative Control) over the period of d0-d42. In particular, inclusion of SOD+CAT (independently of the candidate B or C) in the ratio 400:100 U/kg showed significant improvement on FCR performance.

[1500] In conclusion, the use of a combination of 80 ml/MT of Product A and either 4 ml/MT or 20 ml/MT of Product B appeared to significantly improve 0-42 days of age body weight gains and feed conversion as compared to a standard control ration. Therefore, when commercial piglets are grown on concrete slat floors, this combination appears to have the great potential to result in better live performance.

[1501] Analysis and calculation of body weight coefficient of variation at day 14 shows a significant effect of the treatment according to the invention on CV of BW. The data is shown in table 11. The results show that the enzymes according to the invention improve flock uniformity compared to the control T1.

TABLE 11
Body weight coefficient of variation at day 14

| | Treatment | | | | | | | |
|---|---|---|---|---|---|---|---|---|
| Criterion | T1 | T2 | T3 | T4 | T5 | T6 | T7 | T8 |
| Average Body Wt. (kg) | 8.998 | 9.215 | 9.133 | 9.149 | 9.111 | 9.105 | 9.182 | 9.173 |
| Day 14 | | | | | | | | |
| Stat¹ | b | a | ab | ab | ab | ab | a | a |
| Feed Conversion Corrected | 1.232 | 1.215 | 1.223 | 1.220 | 1.223 | 1.224 | 1.218 | 1.217 |
| Day 0-14 | | | | | | | | |
| Stat¹ | a | a | a | a | a | a | a | a |
| Mortally % | 1.667 | 0.000 | 0.000 | 0.000 | 0.000 | 0.000 | 1.667 | 0.000 |
| Day 0-14 | | | | | | | | |
| Stat¹ | a | a | a | a | a | a | a | a |
| Average Body Wt. | 3.503 | 3.720 | 3.562 | 3.574 | 3.596 | 3.578 | 3.710 | 3.607 |
| Gain (kg) Day 0-14 | | | | | | | | |
| Stat¹ | b | a | ab | ab | ab | ab | a | ab |
| Body Weight Coefficiant of | 6.023 | 4.700 | 4.552 | 5.060 | 5.474 | 4.952 | 5.516 | 5.791 |
| Variation (Day 14) | | | | | | | | |
| Stat¹ | c | ab | a | abc | abc | abc | abc | bc |
| Feed Intake (kg/pig) | 4.36 | 4.52 | 4.36 | 4.36 | 4.40 | 4.38 | 4.57 | 4.39 |
| Day 0-14 | | | | | | | | |
| Stat¹ | a | a | a | a | a | a | a | a |

¹Means within a row without a common superscript are significantly different (P < 0.05) as determined by Least Significant Difference.

### Example 4

### Effect of Antioxidant Enzymes (SOD and CAT) Alone or in Combination on Plasmatic Antioxidant Enzymes, Oxidative Stress Index and Intestinal Gene Expression Response of Weaned Piglets (Based on Animal Trial of Example 3).

### Summary

[1502] The objective of this study was to evaluate anti-oxidant enzymes supplementation (SOD and CAT) alone and in combination in early weaned piglets, and if these enzymes can potentially alleviate the oxidative stress impact on weaned piglets and consequently improve the growth performance. In the in vivo trial (example 3), plasma samples were collected at day 0 (baseline, weaning moment), day 14 and day 42 of the study for additional analysis.

[1503] Piglets supplemented with CAT alone showed a significant increase in the plasmatic antioxidant activity (PAT). At day 42, also piglets supplemented with CAT showed a significant increase of GPx activity. Gene expression showed significant modulation at day 14. In duodenum at day 14, the supplementation of antioxidant enzymes (SOD+CAT) showed a downregulation of the genes that encode NQO1 (protecting the cells against Oxidative Stress OS) and the anti-oxidant enzyme GSTP1 (p=0.07 and p=0.005 respectively) suggesting that diet supplementation with a combination of SOD and CAT decreases stress protein expressions at the beginning of small intestine of weaned piglets. SCARA3 showed also a significant increase in the same group (p=0.003), avoiding accumulation of ROS. At the duodenum, the gene that encodes the antioxidant enzyme GPX1 showed a significant upregulation in piglets supplemented with CAT alone compared to control group and those results are in agreement with the GPx plasmatic activity found. And at the ileum level, supplementation of CAT and SOD alone showed a upregulation on the protecting protein NQO1 but a downregulation on HSP70, and piglets supplemented with SOD+CAT showed a downregulation on the genes NOX5, oxidative stress marker, and CAT, antioxidant enzyme. Those data provide evidence that diet supplementation with a SOD, CAT and the combination of both enzymes, potentially decrease oxidative stress status in weaned piglets.

TABLE 12
Test System

| Treatment | | | |
|---|---|---|---|
| Number (T) | Treatment Description | Dose inclusion | |
| 1 | Neg. control | — | |
| 2 | PC: Avylamycin | 90.7 | g/lb |
| 3 | NC + Product A | A = 1000 | U/kg |
| 4 | NC + Product A | A = 2000 | U/kg |
| 5 | NC + Product B | B = 100 | U/kg |
| 6 | NC + Product C | C = 100 | U/kg |
| 7 | NC + Product A + | A = 400 | U/kg |
| | Product B | B = 100 | U/kg |
| 8 | NC + Product A + | A = 400 | U/kg |
| | Product C | C = 100 | U/kg |

TABLE 13
Biological samples and analysis

| | | | Enzymes | | |
|---|---|---|---|---|---|
| | | | activity: | | |
| | | | SOD, | | |
| | | | CAT | | Gene |
| Type of | | Nb sample/ | GPX, | Vitamins | expres- |
| sample* | Treat. | treat. | OSI | A & E | sion |
| Plasma d0 | 0 | 12 | X | | |
| | 0 | 12 | | X | |
| Plasma d14 | 1, 4, 6, 8 | 12 × 4 = 48 | X | | |
| | 1, 4, 6, 8 | 12 × 4 = 48 | | X | |
| Plasma d42 | 1, 4, 6, 8 | 12 × 4 = 48 | X | | |
| | 1, 4, 6, 8 | 12 × 4 = 48 | | X | |
| Duodenum | 1, 4, 6, 8 | 12 samples × 4 | | | x |
| and Ileumd0 | | treatments × 2 | | | |
| | | tissues = 96 | | | |
| Duodenum | 1, 4, 6, 8 | 12 samples × 4 | | | x |
| and | | treatments × 2 | | | |
| Ileum d14 | | tissues = 96 | | | |
| Duodenum | 1, 4, 6, 8 | 12 samples × 4 | | | x |
| and | | treatments × 2 | | | |
| Ileum d42 | | tissues = 96 | | | |

### Methods

[1504] Oxidative stress PCR array

[1505] Duodenum and ileum were collected for gene expression measurement of genes related to oxidative stress, at day 0 and day 14. The list of the genes evaluated is presented in the table 14 below.

TABLE 14
Genes related to OS

| Gene | | |
|---|---|---|
| Symbol | Official Full Name | Function |
| NQO1 | NAD(P)H dehydrogenase, | Protection against OS |
| | quinone 1 | |
| TXN | Thioredoxin | Anti-oxidant enzymes |
| NOX5 | NADPH oxidase, EF-hand | Oxidative stress |
| | calcium binding domain 5 | marker |
| HSP70 | Heat shock protein 70 | Protection against OS |
| GPX1 | Glutathione peroxidase 1 | Anti-oxidant enzymes |
| SCARA3 | Scavenger receptor class A, | Protection against OS |
| | member 3 | |
| GPX3 | Glutathione peroxidase 3 | Anti-oxidant enzymes |
| GSTP1 | Glutathione S-transferase P | Anti-oxidant enzymes |
| SOD3 | Superoxide dismutase 3, | Anti-oxidant enzymes |
| | extracellular | |
| CAT | Catalase | Anti-oxidant enzymes |
| PRDX5 | Peroxiredoxin 5 | Anti-oxidant enzymes |

[1506] Total RNA was extracted from tissues (stored at -20° C. in RNA later) by lysing tissue with FastPrep® 24 (MP Biomedicals, Illkirch, France), using the phenol-chloroform method (TRIzol reagent; Invitrogen, Invitrogen, Cergy Pontoise, France) followed by purification using RNeasy columns by automated method with the Qiacube HT (Qiagen, Courtaboeuf, France). The concentration of RNA was measured by NanoDrop ND-1000 Spectrophotometer (Thermo Fisher Scientific, Illkirch, France) and the purity was estimated by A260/A280 ratio. RNA integrity was assessed by using the Agilent 2100 Bioanalyzer (Agilent Technologies, Basel, Switzerland). The threshold of the RNA Integrity Number (RIN) was set at 7.5 to validate sufficient quality of the RNAs.

[1507] The reverse transcription was performed using RT² First Strand Kit (Qiagen, Courtaboeuf, France) with 500 ng of total RNA. The reaction mix was incubated 5 minutes at 42° C. for genomic DNA elimination, followed by the reverse transcription 15 minutes at 42° C. The inactivation of the enzyme was performed by heating 5 minutes at 95° C. The resultant cDNAs were amplified with RT² SYBR Green Mastermixes (Qiagen, Courtaboeuf, France) for real-time PCR. The expression of target genes was normalized with housekeeping genes listed in the table below:

| Gene Symbol | Official Full Name |
|---|---|
| UBC | ubiquitin C |
| GAPDH | glyceraldehyde-3-phosphate dehydrogenase |

The thermal cycling was run on Light Cycler 96 (Roche Diagnostics, Meylan, France) with the following program: 95° C. 10 min, followed by 40 cycles of denaturation at 95° C. 15 seconds and hybridization/elongation at 60° C. 1 min. The Delta Ct method was used to determine expression of target genes (Livak and Schmittgen, 2001)

Oxidative stress index: FRAS5

[1508] An oxidative stress index was calculated as the ratio of reactive oxygen metabolites (ROM) and Plasma antioxidant capability (PAT) determined in plasma and liver lysate samples. ROM and PAT were analyzed using commercially methods (d-ROM fast test and PAT test) on FRAS5 instrument (Innovatics Laboratory, Philadelphia, USA). For d-ROM test, 10 μL of sample was mixed with an acidic buffer. Then, a chromogen was added, and measured photometrically at 505 nm. The results are expressed in UCarr (1 UCarr=0.08 mg of H2O2/dl). For PAT test, 10 μl of sample was added in a colored solution (mix of source ferric ions and chromogen). The intensity of chromatic change was measured at 505 nm. The results are expressed in UCor (1 UCor=1.4 μM of Vitamin C equivalent). The oxidative stress index was calculated as the ratio of d-ROMs test value to PAT test value.

### Total Proteins Determination

[1509] The concentration of total proteins was determined in liver lysate and plasma, using the Pierce™BCA Protein Assay Kit (Thermo Fisher Scientific, Illkirch-Graffenstaden, France). The samples were processed following the supplier's recommendations. Plasma samples were diluted 100 times. 25 μL of standards or samples were added to 200 μL of working reagent and incubated 30 minutes at 37° C. The colorimetric intensity was measured at 562 nm. Results are expressed in μg of total protein per mL of sample.

### Plasma CAT Activity

[1510] The activity of the catalase was determined using the Amplex® Red Catalase Assay Kit (Molecular Probes A22180). Briefly 25 μL of standards, plasma (adjusted at 1 μg of protein/well) was mixed with 25 μL of 40 μM H2O2 solution and incubated for 30 minutes at room temperature. 50 μL of the Amplex Red/HRP working solution was added to each microplate well containing the samples and standards and incubated 30 min at 37° C. protected from light. The absorbance was measured at 560 nm, and the concentration of CAT in the samples was calculated based on the standard curve.

Plasma SOD activity

[1511] The activity of the superoxide dismutase was determined using the SOD determination KIT (Sigma 19160) and quantity if reagent in each well is described in table 15 below:

TABLE 15

| | SOD | | | | |
|---|---|---|---|---|---|
| | standard | Samples | Blank1 | Blank2* | Blank 3 |
| SOD Standard | 20 μl | — | — | — | — |
| Sample solution | — | 20μl | — | 20 μl | — |
| ddH₂O | | | 20 μl | | 20 μl |
| WST working | 200 μl | 200 μl | 200 μl | 200 μl | 200 μl |
| solution | | | | | |
| Enzyme working | 20 μl | 20 μl | 20 μl | | |
| solution | | | | | |
| Dilution buffer | — | — | — | 20 μl | 20 μl |

[1512] Plasma samples were adjusted to bring 60014 of total protein in the reaction. The plates were incubated for 20 min at 37° C., and the absorbance was read at 450 nm. The SOD activity (SODA) was measured as follow and calculated using the standard curve: SODA={[(A blank 1-A blank 3)−(A sample-A blank 2)]/(A blank 1−A blank 3)}*100

Plasma GPx activity

[1513] The activity of the Glutathione peroxidase was determined using the GPx determination KIT (abcamab102530). Briefly, 40 μL of the colorimetric reaction mix was added to 100 μL of standards and 10 μL of cumene hydroperoxide was added to the standards and to the 50 μL of samples (Plasma samples were adjusted to bring 600 μg of total protein in the reaction). The absorbance at 340 nm was measured (A1), and after 5 min at 25° C., a second measurement was done (A2).

[1514] The GPx activity was calculated as follow:

$$\begin{matrix}Δ A\_ 340 nm = ( ( Sample A 1 - Sample A 2 ) - ( Reagent control A 1 - Reagent control A 2 ) ) & 1 ) \\ B = ( \frac{Δ A 340 nm - intercept}{slope} ) & 2 ) \\ GPx Activity = \frac{( B )}{( T 2 - T 1 ) * V )} * D & 3 )\end{matrix}$$

[1515] Where:

[1516] B=NADPH amount that was decreased between T1 and T2 (in nmol).

[1517] T1=Time of the first reading (A1) (minutes).

[1518] T2=Time of second reading (A2) (minutes).

[1519] V=Pretreated sample volume added into the reaction well (mL).

[1520] D=Sample dilution factor.

### Statistical Analysis

[1521] ANOVA was performed for plasmatic parameters and student test was calculated to evaluate the significance of the differences observed in gene expression.

### Results

### Plasmatic Parameters

[1522] Results of the plasmatic parameters (SOD, CAT and GPx, OS) at day 0, 14 and 42 can be summarized as follows:
[1523] At day 14, the plasmatic activity of the antioxidant enzymes SOD, CAT and GPx were higher than at day 0.
[1524] For the GPx activity, at day 42, the addition of the enzymes in the diet showed a significant increase in group receiving either the CAT alone or in combination with the SOD.
[1525] At day 0, the reactive oxygen metabolites (d-ROM) and the OSI were higher than at day 14 and 42, reflecting the level of response to the stress generated in the early weaning period of the animals, and indicating a higher sensitivity of this biomarker in acute stress compared to the activity of SOD and CAT.
[1526] Interestingly, the d-ROM showed an increase in animals supplemented with CAT or CAT+SOD in both time point.
[1527] At day 14, the plasmatic antioxidant capacity showed a significant difference between experimental groups (p<0.0001) with an increase in group supplemented with CAT or SOD+CAT.

### Gene Expression Targeting Oxidative Stress

[1528] Results of the gene expression analysis are shown in Table 16 (Gene expression fold change of oxidative stress related genes in duodenum at day 14), Table 17 (Gene expression fold change of oxidative stress related genes in ileum at day 42) and can be summarized as follows:
[1529] In the group supplemented with both enzymes (SOD+CAT), a downregulation of the genes that encode NQO1 (protecting the cells against OS) and the anti-oxidant enzyme GSTP1 (p=0.07 and p=0.005 respectively) was observed suggesting that diet supplementation with a combination of SOD and CAT decreases stress protein expressions at the beginning of small intestine of weaned piglets.
[1530] SCARA3 showed also a significant increase in the same group (p=0.003), avoiding accumulation of ROS.
[1531] In duodenum at day 42, only the gene that encode the antioxidant enzyme GPX1 gene showed a significant upregulation (p=0.019) in piglets supplemented with CAT alone compared to control group with a fold change of 1.34. Those results are in line with the GPx plasmatic activity found in the piglets after 42 days of supplementation.
[1532] Piglets supplemented with SOD alone showed a upregulation on the protecting protein a NQO1
[1533] Similarly to SOD supplementation alone, piglets supplemented with CAT alone showed an upregulation of NQO1. Besides that, piglets showed a upregulation on antioxidant enzyme GSTP1 and a downregulation of a redox marker NOX5.
[1534] Finally, piglets supplemented with SOD+CAT showed a downregulation on the genes NOX5, oxidative stress marker, and CAT, antioxidant enzyme.

TABLE 16
Gene expression fold change of oxidative stress related
genes in duodenum

| | | | | NC + SOD + |
|---|---|---|---|---|
| Treatments | NC | NC + SOD | NC + CAT | CAT |
| Gene # | A | D | F | H |
| Nqo1 | 1 | −1.25 | — | −1.55 |
| TXN | 1 | −1.27 | — | −1.23 |
| NoX5 | 1 | 1.26 | — | 1.25 |
| HSP70 | 1 | 1.27 | — | −1.33 |
| GPX1 | 1 | −1.08 | — | −1.11 |
| SCARA3 | 1 | 1.18 | — | 1.53 ** |
| GPX3 | 1 | 1.12 | — | −1.18 |
| GSTP1 | 1 | −1.18 | — | −1.60 ** |
| SOD3 | 1 | 1.17 | — | 1.37 * |
| CAT | 1 | −1.05 | — | −1.45 * |
| PRDX5 | 1 | −1.22 * | — | −1.42 ** |

* p <0.05 ; ** p <0.01

TABLE 17
Gene expression fold change of oxidative stress related genes in ileum

| | | | | NC + SOD + |
|---|---|---|---|---|
| | NC | NC + SOD | NC + CAT | CAT |
| Gene # | A | D | F | H |
| Nqo1 | 1 | 2.00 | 1.68 | 1.40 |
| TXN | 1 | 1.23 | 1.48 | −1.13 |
| NoX5 | 1 | −1.05 | −1.65 | −1.64 |
| HSP70 | 1 | −1.57 | −1.74 | −1.33 |
| GPX1 | 1 | −1.40 | 1.31 | −1.24 |
| SCARA3 | 1 | 1.40 | −1.26 | −1.16 |
| GPX3 | 1 | 1.20 | 1.29 | −1.24 |
| GSTP1 | 1 | −1.02 | 1.56 | 1.11 |
| SOD3 | 1 | 1.25 | 1.11 | 1.05 |
| CAT | 1 | −1.01 | −1.20 | −1.64 |
| PRDX5 | 1 | 1.05 | 1.40 | −1.10 |

### Conclusion

[1535] Plasmatic antioxidant enzymes, specially SOD and CAT, showed a clear increase at day 14, independently of the treatment, indicating that the oxidative stress situation induced by piglet weaning is progressively corrected during the postweaning period. A significant increase in the plasmatic antioxidant activity in piglets supplements with CAT alone could be observed. At day 42, piglets supplemented with CAT showed a significant increase of GPx activity.

[1536] Gene expression showed significant modulation at day 14 and not at day 42. In duodenum at day 14, the supplementation of antioxidant enzymes (SOD+CAT) showed a downregulation of the genes that encode NQO1 (protecting the cells against OS) and the anti-oxidant enzyme GSTP1 (p=0.07 and p=0.005 respectively) suggesting that diet supplementation with a combination of SOD and CAT decreases stress protein expressions at the beginning of small intestine of weaned piglets. SCARA3 showed also a significant increase in the same group (p=0.003), avoiding accumulation of ROS.

[1537] At the duodenum, only the gene that encode the antioxidant enzyme GPX1 showed a significant upregulation in piglets supplemented with CAT alone compared to control group and those results are in agreement with the GPx plasmatic activity found at 42 days. And at the ileum level, supplementation of CAT and SOD alone showed a upregulation on the protecting protein NQO1 and piglets supplemented with SOD+CAT showed a downregulation on the genes NOXS, oxidative stress marker, and CAT, antioxidant enzyme. Those data provide evidence that diet supplementation with a SOD, CAT and the combination of both enzymes, potentially decrease oxidative stress status in weaned piglets.

### Example 5

### Cloning and Expression of Superoxide Dismutase from Trichoderma reesei Strains

[1538] Escherichia coli Top-10 strain purchased from Invitrogen (Life Technologies, Carlsbad, Calif., USA) was used to propagate our expression vectors encoding for lysozyme polypeptides. Aspergillus oryzae strain MT3568 was used for heterologous expression of the lysozyme polypeptide encoding sequences. A. oryzae MT3568 is an amdS (acetamidase) disrupted gene derivative of Aspergillus oryzae JaL355 (WO 2002/40694) in which pyrG auxotrophy was restored by disrupting the A. oryzae lacetamidase (amdS) gene with the pyrG gene.

### Media

[1539] DAP2C-1 medium was composed of 0.5 g yeast extract, 30 g Maltodextrin, 11 g magnesium sulphate heptahydrate, 1 g dipotassium phosphate, 2 g citric acid monohydrate, 5.2 g potassium phosphate tribasic monohydrate, 1 mL Dowfax 63N10 (antifoaming agent), 2.5 g calcium carbonate, supplemented with 1 mL KU6 metal solution, and deionised water to 1000 mL. KU6 metal solution was composed of 6.8 g ZnCl₂, 2.5 g CuSO₄.5H₂O, 0.13 g NiCl₂, 13.9 g FeSO₄.7H₂O, 8.45 g MnSO₄.H₂O, 3 g C₆H₈O₇.H₂O, and deionised water to 1000 mL. YP 2% glucose medium was composed of 10 g yeast extract, 20 g Bacto-peptone, 20 g glucose, and deionised water to 1000 mL.

[1540] LB plates were composed of 10 g of Bacto-tryptone, 5 g of yeast extract, 1 Og of sodium chloride, 15 g of Bacto-agar, and deionised water to 1000 mL.

[1541] LB medium was composed of 10 g of Bacto-tryptone, 5 g of yeast extract, and 10 g of sodium chloride, and deionised water to 1000 mL.

[1542] COVE-Sucrose-T plates were composed of 342 g of sucrose, 20 g of agar powder, 20 mL of COVE salt solution, and deionised water to 1000 mL. The medium was sterilized by autoclaving at 15 psi for 15 minutes (Bacteriological Analytical Manual, 8th Edition, Revision A, 1998). The medium was cooled to 60° C. and 10 mM acetamide, Triton X-100 (504/500 mL) were added.

[1543] COVE-N-Agar tubes were composed of 218 g Sorbitol, 10 g Dextrose, 2.02 g KNO₃, 25 g agar, 50 mL Cove salt solution, and deionised water up to 1000 mL.

[1544] COVE salt solution was composed of 2 6 g of MgSO₄.7H₂O, 26 g of KCl, 26 g of KH₂PO₄, 50 mL of COVE trace metal solution, and deionised water to 1000 mL.

[1545] COVE trace metal solution was composed of 0.04 g of Na₂B₄O₇.10H₂O, 0.4 g of CuSO₄.5H₂O, 1.2 g of FeSO₄.7H₂O, 0.7 g of MnSO₄.H₂O, 0.8 g of Na₂MoO₄.2H₂O, 10 g of ZnSO₄.7H₂O, and deionised water to 1000 mL.

### Cloning

[1546] Aspergillus niger MBin118 is disclosed in WO 2004/090155.

[1547] The SEQ ID NO 1 polypeptide coding sequence was cloned from Trichoderma reesei QM6a DNA by PCR.

[1548] Trichoderma reesei QM6a was cultivated in 100 ml of YP+2% glucose medium in 1000 ml Erlenmeyer shake flasks for 5 days at 20° C. Mycelia were harvested from the flasks by filtration of the medium through a Buchner vacuum funnel lined with MIRACLOTH® (EMD Millipore, Billerica, Mass., USA). Mycelia were frozen in liquid nitrogen and stored at −80C until further use. Genomic DNA was isolated using a DNEASY® Plant Maxi Kit (QIAGEN GMBH, Hilden Germany) according to the manufacturer's instructions.

[1549] Genomic sequence information was generated by Illumina MySeq (Illumina Inc., San Diego, Calif.). 5 μgs of the isolated Trichoderma reesei QM6a genomic DNA was used for library preparation and analysis according to the manufacturer's instructions. A 300 bp, paired end strategy was employed with a library insert size of 200-500 bp. The reads were subsequently fractionated to 25% followed by trimming (extracting longest sub-sequences having Phred-scores of 10 or more). These reads were assembled using ldba version 0.18. Contigs shorter than 200 bp were discarded. Genes were called using GeneMark.hmm ES version 2.3c and identification of the catalytic domain was made using “SOD_Cu” Hidden Markov Model provided by Pfam. A Swissprot entry of the identical sequence is also available: GORPL7_HYPJQ. The polypeptide coding sequence for the entire coding region was cloned from Trichoderma reesei QM6a genomic DNA by PCR using the primers (SEQ ID NO: A and SEQ ID NO: B) described below.

(SEQ ID NO: A)
5′-ACACAACTGGGGATCCACCATGCGGCCGTCTGGGTTCCT-3′
(SEQ ID NO: B)
5′-CTAGATCTCGAGAAGCTTTCACAGGGAGAAGAAGATGGC-3′

[1550] Bold letters represent Trichoderma harzianum enzyme coding sequence. Restriction sites are underlined. The sequence to the left of the restriction sites is homologous to the insertion sites of pDau109 (WO 2005/042735).

[1551] In-Fusion™ Advantage PCR Cloning Kit Cat. nr 639620

[1552] The amplification reaction (50 μl) was performed according to the manufacturer's instructions (Thermo Scientific) with the following final concentrations:

[1553] 1× Phusion HC buffer

[1554] 200 uM dNTP

[1555] 2.0 mM MgCl₂

[1556] 0.5 uM of each primer of SEQ ID NO: A+B

[1557] 10 ng of Trichoderma harzianum O4 genomic DNA.

[1558] The PCR reaction was incubated in a DYAD® Dual-Block Thermal Cycler (BioRad, USA) programmed for 1 cycle at 98° C. for 2 minutes; 30 cycles each at 98° C. for 10 seconds and 72° C. for two minutes followed by 1 cycle at 72° C. for 6 minutes. Samples were cooled to 10° C. before removal and further processing.

[1559] Five μl of the PCR reaction were analyzed by 1% agarose gel electrophoresis using 40 mM Tris base, 20 mM sodium acetate, 1 mM disodium EDTA (TAE) buffer. A major band of about 1 kb was observed. The remaining PCR reaction was purified directly with an ILLUSTRA™ GFX™ PCR DNA and Gel Band Purification Kit (GE Healthcare, Piscataway, N.J., USA) according to the manufacturer's instructions.

[1560] Two μg of plasmid pDau109 was digested with Barn HI and Hind III and the digested plasmid was run on a 1% agarose gel using 50 mM Tris base-50 mM boric acid-1 mM disodium EDTA (TBE) buffer in order to remove the stuffer fragment from the restricted plasmid. The bands were visualized by the addition of SYBR® Safe DNA gel stain (Life Technologies Corporation, Grand Island, N.Y., USA) and use of a 470 nm wavelength transilluminator. The band corresponding to the restricted plasmid was excised and purified using an ILLUSTRA™ GFX™ PCR DNA and Gel Band Purification Kit. The plasmid was eluted into 10 mM Tris pH 8.0 and its concentration adjusted to 20 ng per μl. An IN-FUSION® PCR Cloning Kit (Clontech Laboratories, Inc., Mountain View, Calif., USA) was used to clone the 1450 bp PCR fragment into pDau109 digested with Barn HI and Hind III (20 ng). The IN-FUSION® total reaction volume was 10 μl. The IN-FUSION® total reaction volume was 10 μl. The IN-FUSION® reaction was transformed into FUSION-BLUE™ E. coli cells (Clontech Laboratories, Inc., Mountain View, Calif., USA) according to the manufacturer's protocol and plated onto LB agar plates supplemented with 50 μg of ampicillin per ml. After incubation overnight at 37° C., transformant colonies were observed growing under selection on the LB plates supplemented with 50 μg of ampicillin per mL.

[1561] Several colonies were selected for analysis by colony PCR using the pDau222 pDau109 vector primers described below. Four colonies were transferred from the LB plates supplemented with 50 lig of ampicillin per ml with a yellow inoculation pin (Nunc A/S, Denmark) to new LB plates supplemented with 50 μg of ampicillin per ml and incubated overnight at 37° C.

| (SEQ ID NO: C) | |
|---|---|
| Primer 8653: | 5′-GCAAGGGATGCCATGCTTGG-3′ |
| (SEQ ID NO: D) | |
| Primer 8654: | 5′-CATATAACCAATTGCCCTC-3′ |

[1562] Each of the three colonies were transferred directly into 200 μl PCR tubes composed of 5 μl of 2× Thermo Scientific Dream Tag™ PCR Master Mix (Thermo Fisher Scientific, Rockford, Ill., USA), 0.5 μl of primer 8653 (10 μm/μl), 0.5 μl of primer 8654 (10 μm/μl), and 4 μl of deionized water. Each colony PCR was incubated in a DYAD® Dual-Block Thermal Cycler programmed for 1 cycle at 94° C. for 60 seconds; 30 cycles each at 95° C. for 30 seconds, 60° C. for 45 seconds, 72° C. for 60 seconds, 68° C. for 10 minutes, and 10° C. for 10 minutes.

[1563] Four μl of each completed PCR reaction were submitted to 1% agarose gel electrophoresis using TAE buffer. All four E. coli transformants showed a PCR band of about 1 kb. Plasmid DNA was isolated from each of the four colonies using a QIAprep Spin Miniprep Kit (QIAGEN GMBH, Hilden Germany). The resulting plasmid DNA was sequenced with primers 8653 and 8654 using an Applied Biosystems Model 3730 Automated DNA Sequencer using version 3.1 BIG-DYE™ terminator chemistry (Applied Biosystems, Inc., Foster City, Calif., USA).

[1564] One plasmid was chosen for transforming Aspergillus oryzae MT3568. A. oryzae MT3568 is an amdS (acetamidase) disrupted gene derivative of Aspergillus oryzae JaL355 (WO 2002/40694) in which pyrG auxotrophy was restored by inactivating the A. oryzae amdS gene. Protoplasts of A. oryzae MT3568 were prepared according to the method described in European Patent, EP0238023, pages 14-15.

[1565] E. coli 190 containing the selected plasmid was grown overnight according to the manufacturer's instructions (Genomed) and the plasmid DNA was isolated using a Plasmid Midi Kit (Genomed JETquick kit, cat.nr. 400250, GENOMED GmbH, Germany) according to the manufacturer's instructions. The purified plasmid DNA was transformed into Aspergillus oryzae MT3568. A. oryzae MT3568 protoplasts were prepared according to the method of Christensen et al., 1988, Bio/Technology 6: 1419-1422. The selection plates consisted of COVE sucrose with +10 mM acetamide +15 mM CsCl+TRITON® X-100 (50 μl/500ml). The plates were incubated at 37° C. Briefly, 8 uls of plasmid DNA representing 3 ugs of DNA was added to 100 uls MT3568 protoplasts. 250 ul of 60% PEG solution was added and the tubes were gently mixed and incubate at 37° for 30 minutes. The mix was added to 10 ml of pre- melted Cove top agarose (The top agarose melted and then the temperature equilibrated to 40 C in a warm water bath before being added to the protoplast mixture). The combined mixture was then plated on two Cove-sucrose selection petri plates with 10 mM acetamide.The plates are incubated at 37° C. for 4 days. Single Aspergillus transformed colonies were identified by growth on the selection Acetimide as a carbon source. Each of the four A. oryzae transformants were inoculated into 750 μl of YP medium supplemented with 2% glucose and also 750 μl of 2% maltodextrin and also DAP4C in 96 well deep plates and incubated at 37° C. stationary for 4 days. At same time the four transformants were restreaked on COVE-2 sucrose agar medium.

[1566] Culture broth from the Aspergillus oryzae transformants were then analyzed for production of the SEQ ID NO 1 polypeptide by SDS-PAGE using NUPAGE® 10% Bis-Tris SDS gels (Invitrogen, Carlsbad, Calif., USA) according to the manufacturer. Two bands at approximately 97 kDa and 45 kDa were observed for each of the Aspergillus oryzae transformants. One A. oryzae transformant producing the SEQ ID NO 1 polypeptide was selected and was cultivated in 1000 ml Erlenmeyer shake flasks containing 100 ml of DAP2C medium at 30° C. for 3 days with agitation at 150 rpm.

[1567] Using Aspergillus versicolor, Aspergillus deflectus, or Aspergillus egyptiacus, SEQ ID NO 2, 3, and 4 were similarly cloned and expressed.

### Example 6

### Cloning and Expression of Fungal Superoxide Dismutase

[1568] Strains

[1569] Escherichia coli Top-10 strain purchased from TIANGEN (TIANGEN Biotech Co. Ltd., Beijing, China) was used to propagate our expression vector.

[1570] Aspergillus oryzae strain MT3568 (described in WO2015040159) was used for heterologous expression of the genes described in Table 1.

[1571] Aspergillus oryzae strain DAU785 (described in WO2018/113745) was used for heterologous expression of the genes described in the Table 2.

[1572] Media

[1573] Dap4C medium was composed of 11 g MgSO₄.7H₂O, 1 g KH₂PO₄, 2.2 g Citric acid-H₂O, 20 g glucose, 10 g maltose, 5.2 g K₃PO₄-H₂O, 0.5 g yeast extract, 1.25 g CaCO₃, 0.5 ml AMG Trace element solution and deionized water to 1 liter. After autoclave, 3.3 ml of 20% Lactic Acid (autoclaved) and 9.3 ml of 50% (NH₄)₂HPO₄ (sterile filtered) were added to every 400 ml above medium.

[1574] AMG Trace element solution was composed of 6.8 g ZnCl₂, 2.5 g CuSO₄.5H₂O, 0.24 g NiCl₂.5H₂O, 13.9 g FeSO₄.7H2O, 13.6 g MnSO₄.5H₂O, 3 g Citric acid-H₂O, and deionised water to 1000 ml.

[1575] LB plates were composed of 10 g of Bacto-tryptone, 5 g of yeast extract, 10 g of sodium chloride, 15 g of Bacto-agar, and deionised water to 1000 ml.

[1576] LB medium was composed of 1 g of Bacto-tryptone, 5 g of yeast extract, and 10 g of sodium chloride, and deionised water to 1000 ml.

[1577] COVE sucrose plates were composed of 342 g of sucrose, 20 g of agar powder, 20 ml of COVE salt solution, and deionized water to 1 liter. The medium was sterilized by autoclaving at 15 psi for 15 minutes. For the transformation of MT3568, 10 mM acetamide was added, when the medium was cooled to 60° C.

[1578] COVE-2 μlate/tube for isolation: 30 g/L sucrose, 20 ml/L COVE salt solution, 10 mM acetamide (only for the transformantes of MT3568), 30 g/L noble agar (Difco, Cat#214220). COVE salt solution was composed of 26 g of MgSO₄.7H₂O, 26 g of KCL, 26 g of KH₂PO₄, 50 ml of COVE trace metal solution, and deionised water to 1000 ml.

[1579] COVE trace metal solution was composed of 0.04 g of Na₂B₄O₇.10H₂O, 0.4 g of CuSO₄.5H₂O, 1.2 g of FeSO₄.7H₂O, 0.7 g of MnSO₄.H₂O, 0.8 g of Na₂MoO₄.2H₂O, 10 g of ZnSO₄.7H₂O, and deionised water to 1000 ml.

[1580] The SOD genes derived from fungal strains isolated from environmental samples by standard microbiological isolation techniques. Strains were identified, and taxonomy was assigned based on DNA sequencing of the ITS

| SEQ ID | Donor scientific name |
|---|---|
| SEQ ID NO 9 | Westerdykella sp. AS85-2 |
| SEQ ID NO 10 | Aspergillus sp. XZ2669 |
| SEQ ID NO 11 | Preussia terricola |
| SEQ ID NO 12 | Kionochaeta sp. |
| SEQ ID NO 13 | Kionochaeta sp. |
| SEQ ID NO 16 | Preussia flanaganii |
| SEQ ID NO 17 | Cladobotryum sp. |
| SEQ ID NO 18 | Cladobotryum sp. |
| SEQ ID NO 19 | Westerdykella sp-46156 |
| SEQ ID NO 20 | Trichoderma hamatum |

| SEQ ID | Donor scientific name |
|---|---|
| SEQ ID NO 14 | Metapochonia bulbillosa |
| SEQ ID NO 15 | Xylomelasma sp. XZ0718 |
| SEQ ID NO 22 | Cephalotrichiella penicillata |
| SEQ ID NO 23 | Chaetomium megalocarpum |
| SEQ ID NO 24 | Chaetomium thermophilum var. thermophilum |
| SEQ ID NO 25 | Humicola hyalothermophila |
| SEQ ID NO 26 | Subramaniula anamorphosa |
| SEQ ID NO 28 | Trichoderma rossicum |
| SEQ ID NO 29 | Trichoderma lixii |
| SEQ ID NO 30 | Trichoderma sp-54723 |
| SEQ ID NO 31 | Aspergillus niveus |
| SEQ ID NO 32 | Aspergillus templicola |
| SEQ ID NO 33 | Pochonia chlamydosporia var. spinulospora |
| SEQ ID NO 34 | Trichoderma sp-44174 |
| SEQ ID NO 35 | Trichoderma rossicum |
| SEQ ID NO 36 | Trichoderma rossicum |
| SEQ ID NO 37 | Trichoderma sp-54723 |
| SEQ ID NO 39 | Trichoderma sp-44174 |
| SEQ ID NO 40 | Metapochonia suchlasporia |
| SEQ ID NO 41 | Metarhizium marquandii |
| SEQ ID NO 42 | Diaporthe nobilis |
| SEQ ID NO 43 | Tolypocladium sp. XZ2627 |
| SEQ ID NO 44 | Aspergillus japonicus |
| SEQ ID NO 45 | Metarhizium sp. XZ2431 |

[1581] Chromosomal DNA from individual strains was isolated by QIAamp Dneasy Kit (Qiagen, Hilden, Germany). 5 μg of chromosomal DNA were sent for full genome sequencing using Illumina technology. Genome sequencing, the subsequent assembly of reads and the gene discovery (i.e. annotation of gene functions) is known to the person skilled in the art and the service can be purchased commercially.

[1582] The genome sequences were analyzed for putative SOD from the PFAM database families PF00880, PF00881 and PF02777. This analysis identified genes encoding putative SOD, which were subsequently cloned and recombinantly expressed in Aspergillus oryzae.

[1583] The SOD genes were amplified by PCR respectively from above isolated genomic DNA. The purified PCR product was cloned into the previously digested pCaHj505 (for the genes listed in Table 1) or pDAU724 (for the genes listed in Table 2) by ligation with an IN-FUSION™ CF Dry-down Cloning Kit (Clontech Laboratories, Inc., Mountain View, Calif., USA) according to the manufacturer's instructions. The ligation mixture was used to transform E. coli TOP10 chemically competent cells (described in Strains). Correct colonies containing the corresponding SOD gene was selected and verified by DNA sequencing (by SinoGenoMax Company Limited, Beijing, China). The correct SOD containing colony was cultivated overnight in 3 ml of LB medium supplemented with 100 ₗig of ampicillin per ml. Plasmid DNA was purified using a Qiagen Spin Miniprep kit (Cat. 27106) (QIAGEN GmbH, Hilden, Germany) according to the manufacturer's instructions.

[1584] Protoplasts of Aspergillus oryzae MT3568 were prepared according to WO95/002043. Protoplasts of Aspergillus oryzae DAU785 were prepared according to WO2018/113745. 100 μl of protoplasts were mixed with 2.5-10 μg of the Aspergillus expression vector (above extracted plasmid) comprising the SOD gene and 250 μl of 60% PEG 4000, 10 mM CaCl₂, and 10 mM Tris-HCl pH7.5 and gently mixed. The mixture was incubated at 37° C. for 30 minutes and the protoplasts were spread onto COVE sucrose plates for selection. After incubation for 4-7 days at 37° C. spores of 4 transformants were inoculated into 3 ml of Dap4C medium.

[1585] After 3 days cultivation at 30° C., the culture broths were analyzed by SDS-PAGE using Novex® 4-20% Tris-Glycine Gel (Invitrogen Corporation, Carlsbad, CA, USA) to identify the transformants producing the largest amount of recombinant SOD with respective estimated mature peptide size.

[1586] Spores of the best expressed transformant were spread on COVE-2 μlates for re-isolation in order to isolate single colonies. Then a single colony was spread on a COVE-2 tube until sporulation.

[1587] Spores from the best expressed transformant were cultivated in 2400 ml of Dap4C medium in shake flasks during 3 days at a temperature of 30° C. under 80 rpm agitation. Culture broth was harvested by filtration using a 0.22 μm filter device. The filtered fermentation broth was used for enzyme characterization.

### Example 7

### Cloning and Expression of Fungal Superoxide Dismutase

[1588] Strains

[1589] Escherichia coli Top-10 strain purchased from Invitrogen (Thermofisher Inc.) was used to propagate our expression vector.

[1590] Aspergillus oryzae strain MT3568 (described in WO2015040159) was used for heterologous expression of the genes described in Table 1.

[1591] Media

[1592] DAP4C medium is composed of 11 g MgSO₄.7H₂O, 1 g KH₂PO₄, 2.2 g Citric acid-H₂O, 20 g glucose, 10 g maltose, 5.2 g K₃PO₄.H₂O, 0.5 g yeast extract, 1.25 g CaCO₃, 0.5 ml AMG Trace element solution and deionized water to 1 liter. After autoclaving, 3.3 ml of 20% Lactic Acid (autoclaved) and 9.3 ml of 50% (NH₄)₂HPO₄ (sterile filtered) are added to every 400 ml of the above medium.

[1593] AMG Trace element solution is composed of 6.8 g ZnCl₂, 2.5 g CuSO₄.5H₂O, 0.24 g NiCl₂.5H₂O, 13.9 g FeSO₄.7H2O, 13.6 g MnSO₄.5H₂O, 3 g Citric acid-H₂O, and deionised water to 1000 ml.

[1594] LB plates are composed of 10 g of Bacto-tryptone, 5 g of yeast extract, 10 g of sodium chloride, 15 g of Bacto-agar, and deionised water to 1000 ml.

[1595] LB medium is composed of 1 g of Bacto-tryptone, 5 g of yeast extract, and 10 g of sodium chloride, and deionised water to 1000 ml.

[1596] COVE sucrose plates are composed of 342 g of sucrose, 20 g of agar powder, 20 ml of COVE salt solution, and deionized water to 1 liter. The medium was sterilized by autoclaving. For the transformation of MT3568, 10 mM acetamide was added, when the medium was cooled to 60° C.

[1597] COVE-2 μlate/tube for isolation if single transformants: 30 g/L sucrose, 20 ml/L COVE salt solution, 10 mM acetamide, 30 g/L noble agar (Difco, Cat#214220).

[1598] COVE salt solution is composed of 26 g of MgSO₄.7H₂O, 26 g of KCL, 26 g of KH₂PO₄, 50 ml of COVE trace metal solution, and deionised water to 1000 ml.

[1599] COVE trace metal solution is composed of 0.04 g of Na₂B₄O₇.10H₂O, 0.4 g of CuSO₄.5H₂O, 1.2 g of FeSO₄.7H₂O, 0.7 g of MnSO₄.H₂O, 0.8 g of Na₂MoO₄.2H₂O, 10 g of ZnSO₄.7H₂O, and deionised water to 1000 ml.

[1600] Cloning, Expression and Fermentation of Fungal SOD Enzymes

[1601] The SOD genes were derived from fungal strains isolated from environmental samples using standard microbiological isolation techniques. The donor strains HEAL7057, HEAL7058 and HEAL7059 were identified, and taxonomy assigned based on the DNA sequencing of the ITS (Table 1). The donor fungal organism for HEAL7007 was Trichoderma reesei QM6a, a publicly available strain originally isolated from the Solomon Islands and is available in collections such as ATCC (ATCC 13631).

[1602] Chromosomal DNA from individual strains was isolated by QIAamp Dneasy Kit (Qiagen, Hilden, Germany). 5 μg of each genomic DNA sample were sent for full genome sequencing using Illumina technology. Genome sequencing, the subsequent assembly of reads and the gene discovery (i.e. annotation of gene functions) is known to persons skilled in the art and the service can also be purchased commercially.

[1603] The genome sequences were BLAST analyzed for putative SOD from the PFAM database families PF00080. This analysis identified genes encoding putative SOD, which were subsequently cloned and recombinantly expressed in Aspergillus oryzae.

[1604] The SOD genes were amplified by PCR respectively from above isolated genomic DNA. The purified PCR products were cloned into the previously digested pDau109 by ligation with an IN-FUSION™ CF Dry-down Cloning Kit (Clontech Laboratories, Inc., Mountain View, Calif., USA) according to the manufacturer's instructions. The plasmid pDAu109 and its use are described in (WO 2005/042735). The ligation mixture was used to transform E. coli TOP10 chemically competent cells (described in Strains). The cloned genes were sequenced and confirmed to be identical to the corresponding genes found in the genome sequences and transformed into the Aspergillus oryzae strain MT3568 (WO 11/057140) by the methods described in Christensen et al., 1988, Biotechnology 6, 1419-1422 and WO 04/032648. Transformants were selected during regeneration from protoplasts based on the ability, conferred by a selectable marker in the expression vector, to utilize acetamide as a nitrogen source, and were subsequently re-isolated under selection.

[1605] Production of the recombinant SOD peptides was evaluated by culturing the transformants in 96-well deep-well microtiter plates for 4 days at 30° C. in either a 0.25 ml or 0.75 ml volume of either or both YPG medium (WO 05/066338) or DAP-4C-1 medium (WO 12/103350) and monitoring peptide expression by SDS-PAGE. A single Aspergillus transformant was selected for each gene based on expression yields as evaluated in microtiter plate fermentation.

[1606] Spores of the best expressed transformant were spread on COVE-2 μlates for re-isolation in order to isolate single colonies. Then a single colony was spread on a COVE-2 tube until sporulation.

[1607] For larger-scale production of the recombinant enzymes, and the Aspergillus transformants were cultured in 500 ml baffled flasks containing 150 ml of fermentation medium. Transformants expressing the SOD peptides were fermented in DAP-4C-1 medium (WO 12/103350). The cultures were shaken on a rotary table at 150 RPM at for 4 days, and the broth was subsequently separated from cellular material by passage through a 0.22 um filtration unit.

### Example 8

### SOD Purification

[1608] The purification process for SOD was firstly applied with hydrophobic interaction chromatography, then if needed, ion exchange chromatography was applied. The difference for all the molecules was buffer type, pH, and salt concentration.

[1609] The culture supernatant of recombinant SOD was firstly added by ammonium sulfate with a final concentration of 2.2M and loaded into Phenyl Sepharose High Performance (GE Healthcare) equilibrated with 20 mM Tris-HCl at pH7.0 with 2.2M ammonium sulfate added. A gradient decrease of ammonium sulfate concentration from 2.2M to 0 was set up as elution condition. The elution fractions and flow-through faction were assayed by SDS-PAGE. The SOD activity was determined by the relative activity method of the SOD activity assay kit from Sigma (Cat No. 19160) described as below.

[1610] If the purity of enzyme purified by first step was not good and contains several bands, ion exchange chromatography will be applied for further purification. The fractions with SOD activity were pooled together and dialyzed with 20 mM Tris-HCl at pH7.0, then loaded into a Mono Q or Capto Q column (GE Healthcare) equilibrated with 20 mM Tris-HCl pH7.0. A gradient increase of NaCl concentration from 0 to 1M with 20 mM Tris-HCl at pH7.0 was set up as elution buffer. The elution fractions and flow-through fraction were assayed for SDS-PAGE and SOD activity.

[1611] The fractions with enzyme activity were pooled together and then diafiltrated with 20 mM Tris-HCl at pH7.0. The protein concentration was determined by Qubit® Protein Assay Kit (Invitrogen, cat Q33212).

### Example 9

### SOD Activity Assay

[1612] SOD activity was determined using the relative active method of the SOD activity assay kit from Sigma (Cat No. 19160). 20 μl SOD with different dilution times by MQ water and 0.01% Triton X-100 was added into 200 μl WST solution (prepared as described for SOD activity assay kit), then 20 μl coupled enzyme solution from kit was added. The mixture was measured at 450 nm for 20 minutes at 37° C. (interval 40 sec, shake before first read). One slope could be created with mOD/min vs enzyme dosage, which could be set as standard curve for each SOD. Two commercial SODs from Sigma®, recombinant SOD bovine expressed in Escherichia coli (S9697) with 6108 U/mg EP and SOD from E. coli (S5639) with 10240 U/mg EP were set as specific activity reference.

[1613] Since the pH of WST working solution was about 10, the SOD activity at alkaline condition might be very low. The SOD activity assay was later adjusted by at pH7.8, which WST solution was replaced by Cytochrome C solution at pH7.8 (Cytochrome C, Sigma-Aldrich C7752). The Cytochrome C working solution contains 50 mM PBS at pH7.8, 0.1 mM EDTA, 0.01 mM CytoC, and 0.05 mM Xanthine (Sigma-Aldrich X0626). The absorbance of mixture was measured at 550 nm.

### Example 10

### Gastric Stability Assay of SODs

[1614] Gastric stability was assayed with artificial gastric juice as stress condition. 20 μl SOD with appropriate dilution was added into 180 μl stress buffer (100 mM NaCl, 0.0013M HCl at pH3.0). The stress buffer with pepsin was prepared by adding 1.11 mg/ml pepsin (from porcine gastric mucosa, P7000, Sigma, 474 U/mg). The mixture was incubated at 37° C. in thermomixer for 0, 15, 30, 45, 60, 90, and 120 minutes separately. 10 μl sample extracted from the mixture was added into 90 μl activity buffer (K₂HPO₄/KH2PO4 mixed with final concentration of 100 mM PBS at pH7.0) as stop mixture. Then 20 μl stop mixture was added into 200 μl WST solution (or CytoC solution at pH7.8), and finally 20 μl coupled enzyme solution from kit was added to measure absorbance. The absorbance was measured at 450 nm for Sigma SOD kit (or 550 nm at pH 7.8) for 20 minutes at 37° C. (interval 40 sec, shake before first read). The activity at pH7.0 without stress condition was set as reference, and the residual activity at stress condition (pH3.0, pH3.0+pepsin) compared with reference was calculated as relative stability.

| | Gastric stability: | Gastric stability: |
|---|---|---|
| | pH 3, + pepsin | pH 3, + pepsin |
| | 15 min - residual | 30 min - residual |
| ID | activity value % | activity value % |
| SOD, sigma | 35 | 26 |
| r E. coli | 43 | 43 |
| SEQ ID NO 1 | 98 | 99 |
| SEQ ID NO 10 | 81 | 83 |
| SEQ ID NO 11 | 70 | 75 |
| SEQ ID NO 12 | 88 | 88 |
| SEQ ID NO 13 | 92 | 89 |
| SEQ ID NO 14 | 100 | 100 |
| SEQ ID NO 15 | 100 | 100 |
| SEQ ID NO 16 | 90 | 92 |
| SEQ ID NO 17 | 100 | 100 |
| SEQ ID NO 18 | 100 | 100 |
| SEQ ID NO 19 | 52 | 53 |
| SEQ ID NO 20 | 98 | 97 |
| SEQ ID NO 22 | 84 | 85 |
| SEQ ID NO 23 | 45 | 45 |
| SEQ ID NO 24 | 57 | 58 |
| SEQ ID NO 25 | 62 | 62 |
| SEQ ID NO 26 | 97 | 97 |
| SEQ ID NO 27 | 78 | 81 |
| SEQ ID NO 28 | 128 | 122 |
| SEQ ID NO 29 | 144 | 126 |
| SEQ ID NO 30 | 124 | 125 |
| SEQ ID NO 31 | 126 | 140 |
| SEQ ID NO 32 | 90 | 90 |
| SEQ ID NO 33 | 105 | 90 |
| SEQ ID NO 34 | 120 | 127 |
| SEQ ID NO 35 | 101 | 113 |
| SEQ ID NO 36 | 96 | 96 |
| SEQ ID NO 37 | 100 | 105 |
| SEQ ID NO 38 | 98 | 92 |
| SEQ ID NO 39 | 104 | 116 |
| SEQ ID NO 40 | 83 | 88 |
| SEQ ID NO 41 | 118 | 116 |
| SEQ ID NO 42 | 98 | 99 |
| SEQ ID NO 43 | 109 | 107 |
| SEQ ID NO 44 | 104 | 116 |
| SEQ ID NO 45 | 104 | 111 |
| SEQ ID NO 46 | 79 | 77 |
| SEQ ID NO 47 | 41 | 42 |
| SEQ ID NO 48 | 61 | 60 |

[1615] As can be seen from the Table, the SODs of the invention are surprisingly gastric stable compared to conventional and commercial SODs.

### Example 11

### Thermal Stability Assay of SODs

[1616] Thermal stability was quantified utilizing nano differential scanning fluorimetry (nDSF). To adjust pH, the samples were diluted 10-fold in a buffer cocktail containing 50 mM 2-(N-Morpholin)ethansulfonsyre (MES), 50 mM glycine, 50 mM acetic acid, pH 3-11. Sample dilutions were conducted using a Hamilton Microlab STAR Liquid Handling System in 96-well microtiter plates and transferred to 384-well microplates. The nDSF experiments were conducted utilizing either a Prometheus NT.48 or Prometheus NT.Plex with autosampler from Nanotemper. With the Prometheus NT.48, the samples were loaded manually using single capillaries (PR-0002), while samples were loaded in the Prometheus NT.Plex using capillary chips (PR-A0002). The experiments were conducted from 20 to 95 ° C. with a temperature gradient of 3.3 ° C/min. The transition temperatures (Tₘ-values) were obtained from peak values derived from the first-derivative of the signal trace (350/330 nm fluorescence ratio or 330 nm fluorescence) using PR.ThermControl software.

### Example 12

### Catalase Cloning and Expression

### Strains

[1617] Escherichia coli Top-10 strain purchased from Invitrogen (Thermofisher Inc.) was used to propagate our expression vector.

[1618] Aspergillus oryzae strain MT3568 (described in WO2015040159) was used for heterologous expression of the genes described in Table 1.

### Media

[1619] DAP4C medium is composed of 11 g MgSO₄.7H₂O, 1 g KH₂PO₄, 2.2 g Citric acid-H₂O, 20 g glucose, 10 g maltose, 5.2 g K₃PO₄.H₂O, 0.5 g yeast extract, 1.25 g CaCO₃, 0.5 ml AMG Trace element solution and deionized water to 1 liter. After autoclaving, 3.3 ml of 20% Lactic Acid (autoclaved) and 9.3 ml of 50% (NH₄)₂HPO₄ (sterile filtered) are added to every 400 ml of the above medium.

[1620] AMG Trace element solution is composed of 6.8 g ZnCl₂, 2.5 g CuSO₄.5H₂O, 0.24 g NiCl₂.5H₂O, 13.9 g FeSO₄.7H2O, 13.6 g MnSO₄.5H₂O, 3 g Citric acid-H₂O, and deionised water to 1000 ml.

[1621] LB plates are composed of 10 g of Bacto-tryptone, 5 g of yeast extract, 10 g of sodium chloride, 15 g of Bacto-agar, and deionised water to 1000 ml.

[1622] LB medium is composed of 1 g of Bacto-tryptone, 5 g of yeast extract, and 10 g of sodium chloride, and deionised water to 1000 ml.

[1623] COVE sucrose plates are composed of 342 g of sucrose, 20 g of agar powder, 20 ml of COVE salt solution, and deionized water to 1 liter. The medium was sterilized by autoclaving. For the transformation of MT3568, 10 mM acetamide was added, when the medium was cooled to 60° C.

[1624] COVE-2 μlate/tube for isolation if single transformants: 30 g/L sucrose, 20 ml/L COVE salt solution, 10 mM acetamide, 30 g/L noble agar (Difco, Cat#214220).

[1625] COVE salt solution is composed of 26 g of MgSO₄.7H₂O, 26 g of KCL, 26 g of KH₂PO₄, 50 ml of COVE trace metal solution, and deionised water to 1000 ml.

[1626] COVE trace metal solution is composed of 0.04 g of Na₂B₄O₇.10H₂O, 0.4 g of CuSO₄.5H₂O, 1.2 g of FeSO₄.7H₂O, 0.7 g of MnSO₄.H₂O, 0.8 g of Na₂MoO₄.2H₂O, 10 g of ZnSO₄.7H₂O, and deionised water to 1000 ml.

### Example 12

### Cloning, Expression and Fermentation of Fungal Catalase Enzymes

[1627] The catalase genes were derived from fungal strains isolated from environmental samples using standard microbiological isolation techniques. The donor strains HEAL7001, was identified, and taxonomy assigned based on the DNA sequencing of the ITS (Table 1). The donor fungal organism for HEAL7060 was Curvularia verruculosa, a publicly available strain originally isolated from a grass inflorescence in The Gambian Republic, Africa. The strain was originally collected in 1966: Curvularia verruculosa Tandon & Bilgrami ex M. B. Ellis, Mycological Papers 106: 20 (1966).

[1628] Chromosomal DNA from individual strains was isolated by QIAamp Dneasy Kit (Qiagen, Hilden, Germany). 5 μg of each genomic DNA sample were sent for full genome sequencing using Illumina technology. Genome sequencing, the subsequent assembly of reads and the gene discovery (i.e. annotation of gene functions) is known to persons skilled in the art and the service can also be purchased commercially.

[1629] The genome sequences were BLAST analyzed for putative catalase from the PFAM database families PF00199 and PF18011. This analysis identified genes encoding putative catalases, which were subsequently cloned and recombinantly expressed in Aspergillus oryzae.

[1630] The catalase genes were amplified by PCR respectively from above isolated genomic DNA. The purified PCR products were cloned into the previously digested pDau109 by ligation with an IN-FUSION™CF Dry-down Cloning Kit (Clontech Laboratories, Inc., Mountain View, Calif., USA) according to the manufacturer's instructions. The plasmid pDAu109 and its use are described in (WO 2005/042735). The ligation mixture was used to transform E. coli TOP10 chemically competent cells (described in Strains). The cloned genes were sequenced and confirmed to be identical to the corresponding genes found in the genome sequences and transformed into the Aspergillus oryzae strain MT3568 (WO 11/057140) by the methods described in Christensen et al., 1988, Biotechnology 6, 1419-1422 and WO 04/032648. Transformants were selected during regeneration from protoplasts based on the ability, conferred by a selectable marker in the expression vector, to utilize acetamide as a nitrogen source, and were subsequently re-isolated under selection.

[1631] Production of the recombinant catalase peptides was evaluated by culturing the transformants in 96-well deep-well microtiter plates for 4 days at 30° C. in either a 0.25 ml or 0.75 ml volume of either or both YPG medium (WO 05/066338) or DAP-4C-1 medium (WO 12/103350) and monitoring peptide expression by SDS-PAGE. A single Aspergillus transformant was selected for each gene based on expression yields as evaluated in microtiter plate fermentation.

[1632] Spores of the best expressed transformant were spread on COVE-2 μlates for re-isolation in order to isolate single colonies. Then a single colony was spread on a COVE-2 tube until sporulation.

[1633] For larger-scale production of the recombinant enzymes, and the Aspergillus transformants were cultured in 500 ml baffled flasks containing 150 ml of fermentation medium. Transformants expressing the catalase peptides were fermented in DAP-4C-1 medium (WO 12/103350). The cultures were shaken on a rotary table at 150 RPM at for 4 days, and the broth was subsequently separated from cellular material by passage through a 0.22 um filtration unit.

### Example 13

### Catalase Activity Assay

[1634] The catalase from Bovine Liver (Sigma®, Enzyme Commission (EC) Number: 1.11.1.6, CAS Number: 9001-05-2, Molecular weight: 250 kDa) has an acitivty of 3524 U/mg EP. Catalase activity was determined by H₂O₂ reduction detected at 240 nm. Firstly, catalase was diluted with different dilution times by MQ water and 0.01% Triton X-100. 10 μl enzyme sample, 90 μl activity buffer (K₂HPO₄/KH₂PO₄ mixed with final concentration of 100 mM PBS at pH7.0) were added into 50 μl 0.2% H₂O₂ solution (30% H₂O₂ was diluted to 0.2% in activity buffer). The mixture was measured at 240 nm for 10 minutes at room temperature (interval 34 sec, shake before first read). The commercial catalase from Sigma®, catalase from bovine liver (C1345), was set as reference. This allows for the selection of the suitable enzyme dosage.

| | Mature | Full length | |
|---|---|---|---|
| | polypeptide | polypeptide | Relative Activity |
| Source | SEQ ID NO | SEQ ID NO | U/mg EP |
| Talaromyces | SEQ ID NO | SEQ ID NO | 1667 |
| stipitatus | 105 | 153 | |
| Penicillium | SEQ ID NO | SEQ ID NO | 8265 |
| emersonii | 108 | 156 | |
| Penicillium | SEQ ID NO | SEQ ID NO | 30953 |
| oxalicum | 116 | 164 | |
| Thermoascus | SEQ ID NO | SEQ ID NO | 10919 |
| crustaceus | 118 | 166 | |
| Thermothelomyces | SEQ ID NO | SEQ ID NO | 18314 |
| thermophilus | 112 | 160 | |
| Curvularia | SEQ ID NO | SEQ ID NO | 20836 |
| verruculosa | 113 | 161 | |
| Aspergillus oryzae | SEQ ID NO | SEQ ID NO | 43975 |
| (NN051131) | 115 | 163 | |
| Aspergillus | SEQ ID NO | SEQ ID NO | 52327 |
| lentulus | 104 | 152 | |
| Aspergillus | SEQ ID NO | SEQ ID NO | 51648 |
| fumigatus | 111 | 159 | |
| Neurospora crassa | SEQ ID NO | SEQ ID NO | 8651 |
| | 123 | 171 | |
| Neurospora crassa | SEQ ID NO | SEQ ID NO | 51184 |
| | 121 | 169 | |
| Malbranchea | SEQ ID NO | SEQ ID NO | 82637 |
| cinnamomea | 106 | 154 | |
| Humicola | SEQ ID NO | SEQ ID NO | 56454 |
| hyalothermophila | 117 | 165 | |
| Thielavia | SEQ ID NO | SEQ ID NO | 5273 |
| australiensis | 119 | 167 | |
| Thermomucor | SEQ ID NO | SEQ ID NO | 7750 |
| indicae-seudaticae | 110 | 158 | |
| Crassicarpon | SEQ ID NO | SEQ ID NO | 39459 |
| thermophilum | 107 | 155 | |

### Example 14

### Gastric Stability Assay for Catalase

[1635] Gastric stability was assayed with artificial gastric juice as stress condition. 100 catalase with appropriate dilution was added into 900 stress buffer (100 mM NaCl, 0.0013M HCl at pH3.0). The stress buffer with pepsin was prepared by adding 1.11 mg/ml pepsin (from porcine gastric mucosa, P7000, Sigma, 474 U/mg) as pH3+pepsin buffer, and also was incubated with 10 ul catalase. The mixture was incubated at 37° C. in thermomixer for 0, 30, 60 and 90 minutes separately. 10 μl sample extracted from the mixture was added into 90 μl activity buffer as stop mixture. Then 100 μl stop mixture was added with 500 0.2% H₂O₂ solution to measure absorbance. The absorbance was measured at 240 nm for 10 minutes at room temperature (interval 34 sec, shake before first read). One slop could be calculated by OD vs min, which presents the activity. The activity at pH7.0 without stress condition was set as reference, and the residual activity at stress condition (pH3.0 or pH3.0+pepsin) compared with reference was calculated as relative stability.

| | Gastric stability: pH 3, + |
|---|---|
| Catalase | pepsin 30 min - |
| SEQ ID NO | residual value % |
| SEQ ID NO 109 | 55 |
| SEQ ID NO 126 | 65 |
| SEQ ID NO 7 | 85 |
| Terminox Ultra ™ | 95 |
| (SEQ ID NO 250) | |
| SEQ ID NO 105 | 97 |
| SEQ ID NO 108 | 85 |
| SEQ ID NO 116 | 98 |
| SEQ ID NO 105 | 81 |
| SEQ ID NO 112 | 97 |
| SEQ ID NO 115 | 77 |
| SEQ ID NO 104 | 82 |
| SEQ ID NO 111 | 46 |
| SEQ ID NO 117 | 97 |
| SEQ ID NO 107 | 100 |
| SEQ ID NO 110 | 100 |
| SEQ ID NO 123 | 100 |
| Catalase ™ | 39 |
| (SEQ ID NO 7) | |

1. An animal feed additive comprising a polypeptide of fungal origin having catalase activity and optionally a polypeptide having superoxide dismutase activity.

2. The animal feed additive according to claim 1 comprising an enzyme component, wherein the enzyme component comprises all of the enzymes of the additive wherein the enzyme component consists of a polypeptide having catalase activity and optionally a polypeptide having superoxide dismutase activity.

3. An animal feed additive comprising at least one and no more than two enzyme classes, wherein the at least one enzyme class is a catalase of fungal origin and the optional second enzyme class is a superoxide dismutase of fungal origin.

4. The animal feed additive of claim 1, wherein the polypeptide having catalase activity of fungal origin is selected from the group consisting of
a. a polypeptide with catalase activity having at least 80% sequence identity to SEQ ID NO: 6;
b. a polypeptide with catalase activity having at least 80% sequence identity to SEQ ID NO: 7
c. a polypeptide with catalase activity having at least 80% sequence identity to SEQ ID NO: 103
d. a polypeptide with catalase activity having at least 80% sequence identity to SEQ ID NO: 104;
e. a polypeptide with catalase activity having at least 80% sequence identity to SEQ ID NO: 105;
f. a polypeptide with catalase activity having at least 80% sequence identity to SEQ ID NO: 106;
g. a polypeptide with catalase activity having at least 80% sequence identity to SEQ ID NO: 107;
h. a polypeptide with catalase activity having at least 80% sequence identity to SEQ ID NO: 108;
i. a polypeptide with catalase activity having at least 80% sequence identity to SEQ ID NO: 109;
j. a polypeptide with catalase activity having at least 80% sequence identity to SEQ ID NO: 110;
k. a polypeptide with catalase activity having at least 80% sequence identity to SEQ ID NO: 111;
l. a polypeptide with catalase activity having at least 80% sequence identity to SEQ ID NO: 112;
m. a polypeptide with catalase activity having at least 80% sequence identity to SEQ ID NO: 113;
n. a polypeptide with catalase activity having at least 80% sequence identity to SEQ ID NO: 114;
o. a polypeptide with catalase activity having at least 80% sequence identity to SEQ ID NO: 115;
p. a polypeptide with catalase activity having at least 80% sequence identity to SEQ ID NO: 116;
q. a polypeptide with catalase activity having at least 80% sequence identity to SEQ ID NO: 117;
r. a polypeptide with catalase activity having at least 80% sequence identity to SEQ ID NO: 118;
s. a polypeptide with catalase activity having at least 80% sequence identity to SEQ ID NO: 119;
t. a polypeptide with catalase activity having at least 80% sequence identity to SEQ ID NO: 120;
u. a polypeptide with catalase activity having at least 80% sequence identity to SEQ ID NO: 121;
v. a polypeptide with catalase activity having at least 80% sequence identity to SEQ ID NO: 122;
w. a polypeptide with catalase activity having at least 80% sequence identity to SEQ ID NO: 123;
x. a polypeptide with catalase activity having at least 80% sequence identity to SEQ ID NO: 124;
y. a polypeptide with catalase activity having at least 80% sequence identity to SEQ ID NO: 125;
z. a polypeptide with catalase activity having at least 80% sequence identity to SEQ ID NO: 126;
aa. a polypeptide with catalase activity having at least 80% sequence identity to SEQ ID NO: 250;
bb. a polypeptide with catalase activity having at least 80% sequence identity to SEQ ID NO: 151;
cc. a polypeptide with catalase activity having at least 80% sequence identity to SEQ ID NO: 152;
dd. a polypeptide with catalase activity having at least 80% sequence identity to SEQ ID NO: 153;
ee. a polypeptide with catalase activity having at least 80% sequence identity to SEQ ID NO: 154;
ff. a polypeptide with catalase activity having at least 80% sequence identity to SEQ ID NO: 155;
gg. a polypeptide with catalase activity having at least 80% sequence identity to SEQ ID NO: 156;
hh. a polypeptide with catalase activity having at least 80% sequence identity to SEQ ID NO: 157;
ii. a polypeptide with catalase activity having at least 80% sequence identity to SEQ ID NO: 158;
jj. a polypeptide with catalase activity having at least 80% sequence identity to SEQ ID NO: 159;
kk. a polypeptide with catalase activity having at least 80% sequence identity to SEQ ID NO: 160;
ll. a polypeptide with catalase activity having at least 80% sequence identity to SEQ ID NO: 161;
mm. a polypeptide with catalase activity having at least 80% sequence identity to SEQ ID NO: 162;
nn. a polypeptide with catalase activity having at least 80% sequence identity to SEQ ID NO:163;
oo. a polypeptide with catalase activity having at least 80% sequence identity to SEQ ID NO: 164;
pp. a polypeptide with catalase activity having at least 80% sequence identity to SEQ ID NO: 165;
qq. a polypeptide with catalase activity having at least 80% sequence identity to SEQ ID NO: 166;
rr. a polypeptide with catalase activity having at least 80% sequence identity to SEQ ID NO: 167;
ss. a polypeptide with catalase activity having at least 80% sequence identity to SEQ ID NO: 168;
tt. a polypeptide with catalase activity having at least 80% sequence identity to SEQ ID NO: 169;
uu. a polypeptide with catalase activity having at least 80% sequence identity to SEQ ID NO: 170;
vv. a polypeptide with catalase activity having at least 80% sequence identity to SEQ ID NO: 171;
ww. a polypeptide with catalase activity having at least 80% sequence identity to SEQ ID NO: 172;
xx. a polypeptide with catalase activity having at least 80% sequence identity to SEQ ID NO: 173;
yy. a polypeptide with catalase activity having at least 80% sequence identity to SEQ ID NO: 174;
zz. a polypeptide with catalase activity having at least 80% sequence identity to SEQ ID NO: 251.

5. The animal feed additive according to claims 1 to 2 of claim 1, wherein the superoxide dismutase is of fungal origin.

6. The animal feed additive of claim 1 wherein the polypeptide of fungal origin having superoxide dismutase activity is selected from the group consisting of:
a. a polypeptide having at least 75% sequence identity to SEQ ID NO: 1;
b. a polypeptide having at least 75% sequence identity to SEQ ID NO: 2;
c. a polypeptide having at least 75% sequence identity to SEQ ID NO: 3;
d. a polypeptide having at least 75% sequence identity to SEQ ID NO: 4;
e. a polypeptide having at least 75% sequence identity to SEQ ID NO: 9;
f. a polypeptide having at least 75% sequence identity to SEQ ID NO: 10;
g. a polypeptide having at least 75%, sequence identity to SEQ ID NO: 11;
h. a polypeptide having at least 75% sequence identity to SEQ ID NO: 12;
i. a polypeptide having at least 75% sequence identity to SEQ ID NO: 13;
j. a polypeptide having at least 75% sequence identity to SEQ ID NO: 14;
k. a polypeptide having at least 75% sequence identity to SEQ ID NO: 15;
I. a polypeptide having at least 75% sequence identity to SEQ ID NO: 16;
m. a polypeptide having at least 75% sequence identity to SEQ ID NO: 17;
n. a polypeptide having at least 75% sequence identity to SEQ ID NO: 19;
o. a polypeptide having at least 75% sequence identity to SEQ ID NO: 20;
p. a polypeptide having at least 75% sequence identity to SEQ ID NO: 21;
q. a polypeptide having at least 75% sequence identity to SEQ ID NO: 22;
r. a polypeptide having at least 75% sequence identity to SEQ ID NO: 23;
s. a polypeptide having at least 75% sequence identity to SEQ ID NO: 24;
t. a polypeptide having at least 75% sequence identity to SEQ ID NO: 25;
u. a polypeptide having at least 75% sequence identity to SEQ ID NO: 26;
v. a polypeptide having at least 75% sequence identity to SEQ ID NO: 27;
w. a polypeptide having at least 75% sequence identity to SEQ ID NO: 28;
x. a polypeptide having at least 75% sequence identity to SEQ ID NO: 29;
y. a polypeptide having at least 75% sequence identity to SEQ ID NO: 30;
z. a polypeptide having at least 75% sequence identity to SEQ ID NO: 31;
aa. a polypeptide having at least 75% sequence identity to SEQ ID NO: 32;
bb. a polypeptide having at least 75% sequence identity to SEQ ID NO: 33;
cc. a polypeptide having at least 75% sequence identity to SEQ ID NO: 34;
dd. a polypeptide having at least 75% sequence identity to SEQ ID NO: 36;
ee. a polypeptide having at least 75% sequence identity to SEQ ID NO: 38;
ff. a polypeptide having at least 75% sequence identity to SEQ ID NO: 39;
gg. a polypeptide having at least 75% sequence identity to SEQ ID NO: 40;
hh. a polypeptide having at least 75% sequence identity to SEQ ID NO: 41;
ii. a polypeptide having at least 75% sequence identity to SEQ ID NO: 42;
jj. a polypeptide having at least 75% sequence identity to SEQ ID NO: 43;
kk. a polypeptide having at least 75% sequence identity to SEQ ID NO: 44;
II. a polypeptide having at least 75% sequence identity to SEQ ID NO: 45;
mm. a polypeptide having at least 75% sequence identity to SEQ ID NO: 46;
nn. a polypeptide having at least 75% sequence identity to SEQ ID NO: 47; and
oo. a polypeptide having at least 75% sequence identity to SEQ ID NO: 48;
pp. a polypeptide having at least 75% sequence identity to SEQ ID NO:199;
qq. a polypeptide having at least 75% sequence identity to SEQ ID NO:200;
rr. a polypeptide having at least 75% sequence identity to SEQ ID NO: 201;
ss. a polypeptide having at least 75% sequence identity to SEQ ID NO:202;
tt. a polypeptide having at least 75% sequence identity to SEQ ID NO:203;
uu. a polypeptide having at least 75% sequence identity to SEQ ID NO:204;
vv. a polypeptide having at least 75% sequence identity to SEQ ID NO: 205;
ww. a polypeptide having at least 75% sequence identity to SEQ ID NO:206;
xx. a polypeptide having at least 75% sequence identity to SEQ ID NO:207;
yy. a polypeptide having at least 75% sequence identity to SEQ ID NO:208;
zz. a polypeptide having at least 75% sequence identity to SEQ ID NO:209;
aaa. a polypeptide having at least 75% sequence identity to SEQ ID NO:232;
bbb. a polypeptide having at least 75% sequence identity to SEQ ID NO:233;
ccc. a polypeptide having at least 75%a sequence identity to SEQ ID NO:234;
ddd. a polypeptide having at least 75% sequence identity to SEQ ID NO:235;
eee. a polypeptide having at least 75% sequence identity to SEQ ID NO:236; and
fff. a polypeptide having at least 75% sequence identity to SEQ ID NO:237.

7. (canceled)

8. The animal feed additive of claim 1, wherein the feed additive comprises one or more polypeptides having catalase activity and/or one or more vitamins.

9. The animal feed additive of claim 8, wherein the one or more vitamins is a fat-soluble vitamin.

10. A method of improving one or more performance parameters in an animal comprising administering to the animal the animal feed additive of claim 1, wherein the one or more performance parameters is selected from the group consisting of the European Production Efficiency Factor (EPEF), Feed Conversion Ratio (FCR), Growth Rate (GR), Body Weight Gain (WG), Mortality Rate (MR) and Flock Uniformity (FU).

11. A method of improving or enhancing immune response and/or reducing inflammation and/or for the modulation of the gut flora in an animal comprising administering to the animal the animal feed additive of claim 1.

12. A method of reducing or eliminating the use of antibiotics administered to an animal feed, comprising administering to the animal the animal feed additive of claim 1.

13. The method of claim 10, wherein the animal has experienced heat stress, cold stress, nutritional stress and/or oxidative stress.

14-17. (canceled)

18. An animal feed comprising one or more protein sources, one or more energy sources, and an animal feed additive of claim 1.

19-20. (canceled)

The application's sequence listing, which the Patent Office published only in electronic form, follows.

SEQUENCE LISTING (251 sequences)

SEQ ID NO: 1 - protein, 287 aa, Trichoderma reesei
  mat_peptide (1)..(287)
KDAPVVIDNPQGVEFKASLPKKPFFAGAALVGNVKGSVSATAGPAGKGVRFRVQFENLPKTGGPFLYHIHEEPAVNGNCTSTLAHLDPYHRGETPACNASEPQTCQVGDLSGKYGKITSDPFVAEYFDLYTSLQPGSPAFFGNRSIVIHYANKTRLTCANFAKLPVPAATTVPSTTGAHHTAIHGPLATGGAQHNLTGSHNTTGHHNFTSPHRTTGAASPSDVYTLTSVVTVPGSPTTSSSLTTTDDAGSGGASATSSVVPFPGAASGNRVSLSLLSGVVAAIFFSL

SEQ ID NO: 2 - protein, 186 aa, Aspergillus versicolor
  mat_peptide (1)..(186)
QDNNADTTDTDTNAPVITDNEPLSFHHASLLKKENTTVYGAITITTRRESAAVQVDVSIGGIPEGEYLNYHIHAARVPDDGNCYLTGAHLDPHGRGQEPPCTITAPQTCEVGDLSGKHGPAWAPAGEEFRATYSDFFLANTPGDDAYYGDLSWVVHGSNGDRLTCGNFDGFSGGGFGNWGGQKSKA

SEQ ID NO: 3 - protein, 138 aa, Aspergillus deflectus
  mat_peptide (1)..(138)
IVSFSQASPGTPVSVGGVLQGLAPGLHGFHVHESPISNGDCATAGSHFNPFHVNHGGPTAEVRHVGDLGNIQADDNGFSILNIQDTHIQLSGEQNILGLSVVIHADPDDLGLGGYPDSLTTGHAGARVACADIVVPGV

SEQ ID NO: 4 - protein, 169 aa, Aspergillus egyptiacus
  mat_peptide (1)..(169)
QDSSTHAPVITNNMPISLYRATLLQKDNTTVYGGIFIGSQGSESASQIDIFLGGIPEGEHLNYHIHQYPVPENGNCYQTGAHLDPYGRGQTPPCDITAPHTCEVGDISGKHGPAFAPPGEVFSASFPDFFLSNNDDKPAFFGNRSFVVHGSGGERLTCGNFEEVDISND

SEQ ID NO: 5 - DNA, 1049 bp, Trichoderma reesei
  gene (1)..(1049)
atgcggccgtctgggttcctggcggtcctttccaccgccctcgttggctatgccgccgcgaaagacgctcctgttgtcattgacaatcctcaaggcgtcgagttcaaggccagtctgcccaagaagccctttttcgccggcgctgcgctggtgggcaatgtcaagggatcggtctctgctacggctggtcctgctggcaagggcgtccggttcagagtccagtttgaaaacttgcccaagacgggcggtcctttttgtgagtcctcttcttgctctcgactactttctgtgtttcatctcttgtctccggtctcacttcatctttccggtcaatggctatgtgtgtgcgccctcaaagtagctaaccaatgcccgtatgcagtgtaccacatccacgaggagccggccgtcaatggcaactgtacctcaacactggcccatctggacccgtaccatcgcggcgagacacctgcctgcaatgcttccgagccccagacgtgccaggtcggtgatctgagcggaaagtacggcaaaatcacgtcggatcccttcgtggccgagtactttgacctctacacgtctctccagcccggcagcccagccttcttcggcaaccgatcaatcgtgatccattacgcaaacaagacgcggctgacgtgcgccaactttgccaagctgccggtgcccgccgcaacgacggtccccagcaccaccggtgctcatcacactgccattcatgggcccctggctaccggtggcgctcaacataacctcaccggctctcacaacaccacaggccaccacaacttcacgagcccccatcgcaccacaggcgctgcctccccctcagacgtctacaccctcaccagcgtcgtcacggtccctggcagtcctaccacctcgtcgagcctcaccaccaccgacgacgctgggagtggtggtgccagcgccacgtcatctgttgttccctttccgggtgcagcatcgggaaacagagtgtccctttccctgctgagcggtgttgtagccgccatcttcttctccctgtg

SEQ ID NO: 6 - protein, 714 aa, Aspergillus niger
  mat_peptide (1)..(714)
QCPYLSGEMSFTQEQDNAGDTIEVTEQTIDNTLYVNDTGSYMTTDFGTPISDQYSLKAGRRGPTLLEDFIFRQKLQRFDHERVPERVVHARGAGAYGTFKSYADWSNVTAADFLSANEKETPMFCRFSTVVGFRGSVDTARDVHGHACRFYTDEGNYDIVGINFAPFFIQDAIQFPDLVHAIKPMPNNEIPQAATAHTSAWDFFSQQSTALHSALWLMSGNGIPRSFRHMNGYGVHSFRFVAANGTSKVVRYRWKSQQGVASLVWEEAQAAAGKNSDYHRQDLYNAIANGHYPKYELQAQIMDEADMLRFGFDLLDPTKLVPEEVVPYTPLGMMELNANPTNYFAEVEQAGFQPGHVVPGIDFTDDPLLQGRLFSYLDTQLTRHGGPNFEQIPVNRPRKPVHNNNRDGFGQQQIPTNNWAYTPNTMSNGYPMQANQTHGHGFFTSPYRYASGHLIREPSPTFHDHWSQPAMFWNSLIPAEQQMVVNAIVFENSKVNSPHVRKNVVNQLNMVNNNLAVRVARGLGLDEPSPNPTYYTSNKTSNVGTFGKPLLSIEGLQVGFLASNSHPESIKQGQAMAAQFSAAGVDLNIVTEAYADGVNTTYALSDAIDFDALIIADGVQSLFASPSLANQMNSTATSTLYPPARPYQILVDSFRYGKPVAAVGSGSAALKNAGIDTSRSGVYTGSSETTENIAKEVLKGLYTFRFVDRFALDE

SEQ ID NO: 7 - protein, 730 aa, Aspergillus niger
  mat_peptide (1)..(740)
MRHFWLLPAVAGIAGAQCPYLSGEMSFTQEQDNAGDTIEVTEQTIDNTLYVNDTGSYMTTDFGTPISDQYSLKAGRRGPTLLEDFIFRQKLQRFDHERVPERVVHARGAGAYGTFKSYADWSNVTAADFLSANEKETPMFCRFSTVVGFRGSVDTARDVHGHACRFYTDEGNYDIVGINFAPFFIQDAIQFPDLVHAIKPMPNNEIPQAATAHTSAWDFFSQQSTALHSALWLMSGNGIPRSFRHMNGYGVHSFRFVAANGTSKVVRYRWKSQQGVASLVWEEAQAAAGKNSDYHRQDLYNAIANGHYPKYELQAQIMDEADMLRFGFDLLDPTKLVPEEVVPYTPLGMMELNANPTNYFAEVEQAGFQPGHVVPGIDFTDDPLLQGRLFSYLDTQLTRHGGPNFEQIPVNRPRKPVHNNNRDGFGQQQIPTNNWAYTPNTMSNGYPMQANQTHGHGFFTSPYRYASGHLIREPSPTFHDHWSQPAMFWNSLIPAEQQMVVNAIVFENSKVNSPHVRKNVVNQLNMVNNNLAVRVARGLGLDEPSPNPTYYTSNKTSNVGTFGKPLLSIEGLQVGFLASNSHPESIKQGQAMAAQFSAAGVDLNIVTEAYADGVNTTYALSDAIDFDALIIADGVQSLFASPSLANQMNSTATSTLYPPARPYQILVDSFRYGKPVAAVGSGSAALKNAGIDTSRSGVYTGSSETTENIAKEVLKGLYTFRFVDRFALDE

SEQ ID NO: 8 - DNA, 2423 bp, Aspergillus niger
  gene (1)..(2423)
atgcgtcatttttggcttttgccagctgttgctggtatcgctggggcccaatgcccctacctgtcgggtgaaatgagtttcacccaggagcaggacaatgctggcgataccattgaggtcacggaacagaccattgacaacactctctatgtcaatgacactggtagctacatgactaccgactttgggaccccgatctccgaccagtacagtctcaaggctggtcgccgtggacctaccctattggaggactttatcttccgacagaagctccagcggttcgaccatgagcgtgtaagtatagtagctgccacagtgtgtacaatgaattgaccaagttttcttgttcaattaggtccccgagcgtgtcgtccacgcccgtggtgccggtgcatacggtaccttcaagtcctacgccgactggtccaacgtcacggctgccgatttcttgagtgccaatgaaaaggagactccgatgttctgtcgcttctctactgttgtcggtttccgtggaagtgttgataccgcgcgtgatgttcacggtcatgcttgtcggttctacactgacgagggtaactatggtatgctctatatcacaacataacaatgattgttgtacatgctaacatttatgtctcttctagacatcgtcggaatcaactttgcccccttcttcatccaggatgccatccagttccccgatcttgttcacgctatcaagcctatgcccaacaatgagatccctcaggccgcgactgctcacacttccgcttgggacttcttcagccagcagagcactgccctccacagtgccttgtggctgatgtctggtaacggtattcctcgttctttccgccacatgaatggatacggtgtccacagcttccgctttgtcgctgccaatggcacttccaaggtggttcgctaccgctggaagtcccagcagggcgttgccagtctggtgtgggaggaagctcaggctgctgctggtaagaacagcgactaccaccgccaggatttgtacaatgcgatcgccaacggtcactaccccaaatatgaagttagtccccaatcgtcctccctttcactcgtagtttcggtcgctgacaatcctctagctgcaagcccagatcatggacgaagccgacatgctccggtttggtttcgaccttctggaccccaccaagctggtccctgaggaggttgtcccttatactcctctcggaatgatggagctcaacgccaaccccaccaactactttgctgaagttgaacaggctggtgtatgtatccccaatctataatgaccagacacaatctgactttcgcagttccaacccggccacgtcgttcctggcattgacttcaccgatgaccccctgctgcaaggccgtctgttctcctacctggacacccagttgacgcgtcacggtggtcccaacttcgagcaaatccccgtcaaccgtcctcgcaagcccgttcacaacaacaaccgtgacggcttcggtcagcagcagatccctaccaacaactgggcctacacccccaataccatgagcaatggctaccccatgcaagccaaccagacccacggtcacggcttcttcacctccccttaccgctacgcctctggccacctcatccgcgagcccagcccgaccttccacgaccactggtcccagcccgccatgttctggaactctctgatccccgctgagcagcagatggttgtcaacgccattgtcttcgagaactccaaggtcaacagccctcacgttcgcaagaacgttgtcaaccagctgaacatggtcaacaacaaccttgccgtccgtgtcgcccgtggtcttggtctcgacgagccctcccccaaccctacctactacacctccaacaagacctccaacgtcggcaccttcggcaagcccctcctcagcatcgaaggtctgcaggttggattcctcgcttccaactcccaccccgagtctatcaagcagggtcaggccatggccgctcagttctctgctgctggagtcgacctgaacatcgttaccgaggcctacgccgatggtgtcaacaccacctacgccctctccgacgctatcgacttcgatgctctcatcatcgccgatggtgtccagagcctctttgcctctccctccctcgccaaccagatgaactctaccgccacttctactctctaccctcctgctagaccttaccagatcctggtcgactctttcaggtacggtaagcctgtcgctgctgtgggtagcggtagcgctgcgcttaagaacgctggtattgatacctcccgctctggtgtgtacactggctcgagcgagaccaccgagaacatcgccaaggaggtcttgaagggactctacactttccgcttcgtggatcggtttgcccttgatgagtaa

SEQ ID NO: 9 - protein, 229 aa, Westerdykella sp. AS85-2
  peptide (1)..(229)
SEQPQQPFAFGDMSAPTYTLPPLPYAYDALEPHISAQIMELHHSKHHQTYITNLNAALRSQAEAVHASDITTQVSLQQAIKFNAGGHINHSLFWQNLAPASSAEAKSSSAPTLVNQIKATWGDEEKFREAFKAALLGIQGSGWGWLVKVETGKEQRLAIVTTKDQDPVVGKGEVPIFGVDMWEHAYYLQYLNGKAAYVENIWNVINWKTAEERFKGTRADAFKVLKASI

SEQ ID NO: 10 - protein, 165 aa, Aspergillus sp.
  Peptide (1)..(165)
QDKTAPVVSDNTPWRFYRAELQDKDNTTVRGTVTAWGPSDGVGINLKVNFWGIPEGQTLQYHIHAKAVPEDGNCYATAKHLDPYGRTDTPPCDIKNPNTCEVGDLSGKHSPVWVPSGNSYSVEYTDYFLSNVEGAEAFFGDLSVVVHAPDSSRLNCGNFKGFFDH

SEQ ID NO: 11 - protein, 230 aa, Preussia terricola
  Peptide (1)..(230)
SEPPQQPFEFGIMGEPTVYHLPVLPYSYNALEPSISAQIMELHHSKHHQTYITNLNAALKAQAGAVHTADIATHISLQQAIRFNGGGHINHALFWENLTPAKSPGADPKSAPKLMQKIKETWGSDDKFREDFKTTALGIQGSGWVWLIKNQLGQEQRLAIVTTKDQDPVVGKGEVPVFGVDMWEHAYYLQYQNGKAAYVDNIWNVINWKTAEERFLGTREDAFRTLKASM

SEQ ID NO: 12 - protein, 160 aa, Kionochaeta sp.
  PEPTIDE (1)..(160)
QTTGKLGDAHPVTNNEVGDVWIATFNGASIKGTVKTEAKAVGVDYTLNITGLPTAQGPFKYHVHHDPVPASGDCGGTGGHLDPFQRGDTPACNSTAPQTCQVGDLSGKYGSVPGPSVSKSFNDPYSALNIIDLQYIGSRSIVFHDANSTRIACATLVKST

SEQ ID NO: 13 - protein, 230 aa, Kionochaeta sp
  PEPTIDE (1)..(230)
DTSDPVTGAQGNATAVVNNPPGVVYKAVLPATAFDAAAYPNGGNVVGEVVAKAKPDGVGVAFHVKFSNLPSAGGPFLYHIHVNPVGDDGNCTKTLAHLDPFVRGETPACDASLPQTCQVGDLSGKYGKITSDPFEANYTDLFASTLPGIGAFFGNRSLVVHLGNTTRVTCANFQLVTSGNQTASNSTATATTTAGSATSKPTASVVANSSATTSATTTATHSTVPQTGAL

SEQ ID NO: 14 - protein, 169 aa, Metapochonia bulbillosa
  PEPTIDE (1)..(169)
TRDAPVVDNNPNVIYQATLPKDPFYSGPINGNIHGYVRASRGPEGKGVKYNVHFQNFPKEGGPFIYHIHVNPVPSDGNCTQTLAHLDPYNRGETPPCDASAPQTCQVGDLSGKHGKITQDPFHVEYVDPYTSLQEGTDAFFGTRSIVVHFGNKTRITCANFERVNGCAA

SEQ ID NO: 15 - protein, 256 aa, Xylomelasma sp
  PEPTIDE (1)..(256)
QDAVAAGPTTGALGNATVVTNNPPGEVYVATLPDTAFDKDAFPDGGNIKGEVAATASPNGIGVVFTVRFSNLPKGLGPFPYHIHDAPVPDDGNCTATLAHLDPFLRGEDPTCNSNLPQTCQVGDLAGKHGRINSDPFEATYTDDFASTLPGIGAFFGNRSIVVHFPNKTRITCANFKLAAGTANIPTTNSTSTSSTNGTFSASATPSSSAAQLTGAGAGTLNPSQSVTTVSAASLVSAASWSLGAASLFAAIMFML

SEQ ID NO: 16 - protein, 232 aa, Preussia flanaganii
  PEPTIDE (1)..(232)
SDLPQQPFEFGEMSAPNFRLPPLPYAYDALEPHISAQIMELHHSKHHQTYVTNLNAAYRSQSEAVHASDLTTQVSLQQAIKFNAGGHINHSLFWQNLAPASSNDAKSSSAPKLLKQIKATWGDEEKFREAFKAALLGIQGSGWGWLVKVETGKEQRLVIMTTKDQDPVVVGQGIPIFGVDMWEHAYYLQYLNGKAAYVENIWNVINWKTAEERFLGSRVDIFESLKPFTGGS

SEQ ID NO: 17 - protein, 239 aa, Cladobotryum sp.
  PEPTIDE (1)..(239)
EDPTGSKPQFASIPDSQQALLGSFSSTMSVSTFSLPALPYAYDALEPSISAQIMELHHSKHHQTYVNNLNNALKSYFVAISANDVPSQIALQAAVKFNGGGHINHSLFWENLCPATSPDADPQSAPTLAAEISKTWGSLEGFKDAMSKALLGLQGSGWGWLVKDGRALRIVTTKDQDPVVGGEVPIFGIDMWEHAYYLQYLNGKAAYVENIWKVINWKTAERRFIGDRDDAFKILKASI

SEQ ID NO: 18 - protein, 261 aa, Cladobotryum sp
  PEPTIDE (1)..(261)
MARQGLFLASLLIFPFASCAASEDPTGSKPQFASIPDSQQALLGSFSSTMSVSTFSLPALPYAYDALEPSISAQIMELHHSKHHQTYVNNLNNALKSYFVAISANDVPSQIALQAAVKFNGGGHINHSLFWENLCPATSPDADPQSAPTLAAEISKTWGSLEGFKDAMSKALLGLQGSGWGWLVKDGRALRIVTTKDQDPVVGGEVPIFGIDMWEHAYYLQYLNGKAAYVENIWKVINWKTAERRFIGDRDDAFKILKASI

SEQ ID NO: 19 - protein, 229 aa, Westerdykella sp-46156
  PEPTIDE (1)..(229)
SEQPQQPFAFGEMSAPTYTLPPLPYAYDALEPHISAQIMELHHSKHHQTYITNLNAALRSQAEAVHAYDITTQVSLQQAIKFNAGGHINHSLFWQNLAPANLAEAKSSSAPTLVNQIKATWGDEEKFREAFKAALLGIQGSGWGWLVKVETGKEQRLAIVTTKDQDPVVGKGEVPIFGVDMWEHAYYLQYLNGKAAYVENIWNVINWKTAEERFKGTRADAFKVLKESI

SEQ ID NO: 20 - protein, 249 aa, Trichoderma hamatum
  PEPTIDE (1)..(249)
SSQDPSKPEFASIEINPPYDSESPIGQTRFVESFEPTMSVGTFSLPALPYAYDALEPSISAQIMELHHSKHHQAYVTNLNTALKTYATAIAANDVPSQIALQAAIKFNGGGHINHSLFWENLSPSSSPDADSASAPALTAEIAKTWGSLKEFQDAMVKALLGIQGSGWGWLVKDGNALRIVTTKDQDPVVGGEVPIFGIDMWEHAYYLQYLNGKAAYVENIWKVINWKTAEQRFKGDRDDAFKILKASL

SEQ ID NO: 21 - protein, 151 aa, Mycothermus thermophilus
  PEPTIDE (1)..(151)
AVAVLRGDSKVTGTVTFEQESESAPTTITWDISGHDPNALRGFHIHTFGDNTNGCTSAGPHFNPHGKTHGAPTDENRHVGDLGNIQTDDNGNSKGTVVDKFVKLIGPESVIGRTVVVHAGTDDLGKGGNEESLKTGNAGPRPACGVIGIAQ

SEQ ID NO: 22 - protein, 196 aa, Cephalotrichiella penicillata
  PEPTIDE (1)..(196)
KATLPDLSYDYGALEPYISGKIMELHHSKHHQTYVNGLNSALEAVDEAKNKGDFTKAASQAPLINFHGGGHLNHSLFWENLAPSNKDGGGEPDGTLKAAINEDFGSVDTLRKQMNTSLAGIQGSGWAWLVKDKTTGTLSVVTRANQDPVTGNLAPLLGIDAWEHAYYLQYENRKAEYFEAIWNVVNWKTVAKRFEN

SEQ ID NO: 23 - protein, 197 aa, Chaetomium megalocarpum
  PEPTIDE (1)..(197)
KATLPDLPYDYGALEPHISGKIMELHHSKHHQTYVNGLNSALQTIAEAESKGDFTKAASVAPLLNFHGGGHINHSLFWENLAPASREGGGEPDGALKKAIDSDFGSFDTFRSQMNTALAGIQGSGWAWLVKDKSAGTLGLVTRANQDPVSGPYVPLMGIDAWEHAYYLQYENRKAEYFDAIWNVINWKTVASRYEKS

SEQ ID NO: 24 - protein, 195 aa, Chaetomium thermophilum
  PEPTIDE (1)..(195)
TLPDLKYDYGALEPYISARIMELHHSKHHQTYVNGLNSALEAIAEAEAKGDFTKAASLAPLLNFHGGGHLNHTLFWENLAPASREGGGEPDGALKKAIEADFGSFETFRKQMNAALTGIQGSGWAWLAKDKDSGNLAIVTRANQDPVTGQLVPLMGIDAWEHAYYLQYENRKAEYFEAIWNVINWKTVAQRFEKA

SEQ ID NO: 25 - protein, 197 aa, Humicola hyalothermophila
  PEPTIDE (1)..(197)
KATLPDLPYDYGALEPHISGKIMELHHTKHHQTYVNGLNSALETIAEAESKGDYTKAASMAPLLNFHGGGHLNHSLFWENLAPASREGGGEPDGALKKAIDTDFGSFDAFRKQMNTALAGIQGSGWAWLVKDKASGTLGVVTRANQDPVTGGLVPLMGIDAWEHAYYLQYENRKAEYFDAIWNVINWKTVASRFDKA

SEQ ID NO: 26 - protein, 200 aa, Subramaniula anamorphosa
  mat_peptide (1)..(200)
VRGKATLPDLQYDYGALEPYISGKIMELHHSKHHQTYVNGLNSALQTIAEAESKGDFTKAATVAPLLNFHGGGHINHTLFWENLAPASRDGGGEPDGALKKAIDSDFGSFDTFRKQMNTALAGIQGSGWAWLVKDKSAGTLGLVTRANQDPVSGPYVPLMGIDAWEHAYYLQYENRKAEYFDAIWNVINWKTVASRFEKS

SEQ ID NO: 27 - protein, 203 aa, Sphingobacterium sp
  PEPTIDE (1)..(203)
QFKQTPLPYAYDALEGAIDAKTMEIHYSKHAAGYTANLNKAIAGTPAEKESIENILAKVSQYSDAVRNNAGGHYNHELFWSILTPNKGTKPSAALQKAIDETFGSLDALKEKINAAGAARFGSGWAWLIVDNGGKLQVTSTPNQDNPLMDFTKEKGTPILGIDVWEHAYYLRYQNKRADYLTTIWDVINWEEVSARYEKALKK

SEQ ID NO: 28 - protein, 192 aa, Trichoderma rossicum
  PEPTIDE (1)..(192)
EKDAPIVTGNPHSVEYKATLPKKPFFSNAALVGNVKGYVSAVAAPSGKGVRFSVQFENFPKSGGPFMYHIHEEPATNGNCTSTLAHLDPYHRGETPACDSSKPETCQVGDLSGKYGKITSDPFVAEYFDLYTSLQPGSPAFFGNRSIVVHYANKTRLTCANFAKLPVSDTATKAHTTTSAHHTVIHGPAASG

SEQ ID NO: 29 - protein, 199 aa, Trichoderma lixii
  PEPTIDE (1)..(199)
EKDAPVVTGNPQSVEYKATLPKKPFFAGADLAGNVKGSVSAVAAPGGKGIRFRVQFENFPKSGGPFMYHIHEEPATNGNCTTTLAHLDPYHRGETPACDSSKPETCQVGDLSGKYGKITSDPFVAEYFDLYTSLQPDNPAFFGNRSIVVHYANKTRLTCANFAKLPVSSAATKSHTTTSAHHTVHGPVATGSPHNVTGA

SEQ ID NO: 30 - protein, 198 aa, Trichoderma sp-54723
  PEPTIDE (1)..(198)
KDAPVVTGNPQSVEYKATLPKKPFFSDAALVGNVKGSVSAAAAPGGKGVRFTVQFENFPTKGGPFMYHIHEEPATNGNCTSTLAHLDPYNRGETPACDASKPETCQVGDLSGKYGKITSDPFVAEYFDLYTSLQPGSPAFFGNRSIVVHYANKTRLTCANFAKLSASNTVTKVAHTTTHHSAIHAPIATGTHHNITSA

SEQ ID NO: 31 - protein, 166 aa, Aspergillus niveus
  PEPTIDE (1)..(166)
VNAHTEAPIVEDNSTADFYHAQLQIKDNSTIRGYMTAWTNSKEGMDFRVVVTGIEGHQALPYHIHEKPVPEDGNCYATGAHLDPYGRGEDPPCDIRNPATCQLGDLSGKHAPAFGPDGAEFMAEFRDFFLSNVPGNPAYFGNLSWVVHAPDKTRLNCGNFKKIVPE

SEQ ID NO: 32 - protein, 166 aa, Aspergillus templicola
  PEPTIDE (1)..(166)
QDKTAPVVTDNKPWRTYTAELQDKDNTTLRGQVTTYGPTDGVGIRLKVSFWGIPEGETLQYHIHAKPVPEDGNCYATAKHLDPYGRTDTPPCDIKNPASCEVGDLSGKHGPVWVPSGHSFNAEYTDYFLSNVEGEEAFFGDLSVVVHASDTSRLNCGNFKGFFESD

SEQ ID NO: 33 - protein, 168 aa, Pochonia chlamydosporia var. spinulospora
  PEPTIDE (1)..(168)
TDAPIVDNNPNTIYQAVLPKDAFYHGKLNGNIRGSVRASRGPHGKGVKYNIHFDNFPKEGGPFIYHVHVNPVPSDGNCTKTLAHLDPYHRGEDPPCDASKPKTCQVGDLSGKFGHIAGGPFRAEYIDPYSSLIEGTDAYIGSRSIVVHFANKTRITCANFERVSGCAA

SEQ ID NO: 34 - protein, 261 aa, Trichoderma sp-44174
  PEPTIDE (1)..(261)
EKDAPVVTGNPDNVEYKATLPKKPFFSDAALVGNVKGSVSAVAAPGGKGVRFSVQFENFPKSGGPFMYHIHEEPATNGNCTSTLAHLDPYHRGETPACDSSKPETCQVGDLSGKYGKITSDPFVAEYFDLYTSLQPDSPAFFGNRSIVVHYANKTRLTCANFAKLPVSNAATKSHTATSAHHTVHGPVATGAHHNITGAHNTTSRHNTTGPRYSTGPHHTTSISPTGALTDIVTTTSTSFTTVPAGSTASATSSVVPFPGA

SEQ ID NO: 35 - protein, 304 aa, Trichoderma sp-44174
  PEPTIDE (1)..(285)
MRASGILTVLSLAVSSCVAEKDAPIVTGNPHSVEYKATLPKKPFFSNAALVGNVKGYVSAVAAPSGKGVRFSVQFENFPKSGGPFMYHIHEEPATNGNCTSTLAHLDPYHRGETPACDSSKPETCQVGDLSGKYGKITSDPFVAEYFDLYTSLQPGSPAFFGNRSIVVHYANKTRLTCANFAKLPVSDTATKAHTTTSAHHTVIHGPAASGGRHNTTSSHNITGPHYTTGSHHTTDVSPTGSLNPTGIVTAPGSPTTPATFTTVAAGGSASATSSIVPFPGAASGNRVSLALLSGVVAAMFFSL

SEQ ID NO: 36 - protein, 285 aa, Trichoderma rossicum
  mat_peptide (1)..(285)
EKDAPIVTGNPHSVEYKATLPKKPFFSNAALVGNVKGYVSAVAAPSGKGVRFSVQFENFPKSGGPFMYHIHEEPATNGNCTSTLAHLDPYHRGETPACDSSKPETCQVGDLSGKYGKITSDPFVAEYFDLYTSLQPGSPAFFGNRSIVVHYANKTRLTCANFAKLPVSDTATKAHTTTSAHHTVIHGPAASGGRHNTTSSHNITGPHYTTGSHHTTDVSPTGSLNPTGIVTAPGSPTTPATFTTVAAGGSASATSSIVPFPGAASGNRVSLALLSGVVAAMFFSL

SEQ ID NO: 37 - protein, 304 aa, Trichoderma rossicum
  PEPTIDE (1)..(304)
MRASGILAVLSLAVSGCIAEKDAPIVTGNPHSVEYKATLPKKPFFSNAALVGNVKGYVSAVAAPSGKGVRFSVQFENFPKSGGPFMYHIHEEPATNGNCTSTLAHLDPYHRGETPACDSSKPETCQVGDLSGKYGKITSDPFVAEYFDLYTSLQPGSPAFFGNRSIVVHYANKTRLTCANFAKLPVSDTATKAHTTTSAHHTVIHGPAASGGRHNTTSSHNITGPHYTTGSHHTTDVSPTGSLNPTGIVTAPGSPTTPATFTTVAAGGSASATSSIVPFPGAASGNRVSLALLSGVVAAMFFSL

SEQ ID NO: 38 - protein, 290 aa, Trichoderma sp-54723
  PEPTIDE (1)..(290)
KDAPVVTGNPQSVEYKATLPKKPFFSDAALVGNVKGSVSAAAAPGGKGVRFTVQFENFPTKGGPFMYHIHEEPATNGNCTSTLAHLDPYNRGETPACDASKPETCQVGDLSGKYGKITSDPFVAEYFDLYTSLQPGSPAFFGNRSIVVHYANKTRLTCANFAKLSASNTVTKVAHTTTHHSAIHAPIATGTHHNITSAHNTTRPHNTTGPHYTTGPHHTTGVVSPTDILTLTGIVTAPGSPTTSATLTTVPAGSSASATSSIVPFPGAASGNKVSIYLLSGVVAVMFFSL

SEQ ID NO: 39 - protein, 284 aa, Trichoderma sp-44174
  PEPTIDE (1)..(284)
EKDAPVVTGNPDNVEYKATLPKKPFFSDAALVGNVKGSVSAVAAPGGKGVRFSVQFENFPKSGGPFMYHIHEEPATNGNCTSTLAHLDPYHRGETPACDSSKPETCQVGDLSGKYGKITSDPFVAEYFDLYTSLQPDSPAFFGNRSIVVHYANKTRLTCANFAKLPVSNAATKSHTATSAHHTVHGPVATGAHHNITGAHNTTSRHNTTGPRYSTGPHHTTSISPTGALTDIVTTTSTSFTTVPAGSTASATSSVVPFPGAASGNRVSIFSLLSGVVAVVFFSL

SEQ ID NO: 40 - protein, 169 aa, Metapochonia suchlasporia
  PEPTIDE (1)..(169)
TRDAPVVDNNPNVIYQAILPKDAFYHGPIHGNIRGSVRASRGPDGKGVKYNVHFENFPKEGGPFIYHLHVNPVPGDGNCTKTLAHLDPYGRGEDPPCDASAPQTCQVGDLSGKHGKITQDPFRAEYVDPFSSLQDGTDAFFGNRSIVVHFGNKTRITCANFERVSGCAA

SEQ ID NO: 41 - protein, 169 aa, Metarhizium marquandii
  PEPTIDE (1)..(169)
AQDAPKVDHNPHVTYEAILPKEAFYHGKLDGNVRGSVLASRGPHGKGVKFDVQFRNFPKEGGPFLYHIHVNPVPSDGNCTKTLTHLDPYGRGETPPCDPSQPQQCEVGDLSGKHGKIMQDPFSMQYIDPYASLTEGTPAFLGNRSIVVHFGNKTRITCANFQRVAGCGA

SEQ ID NO: 42 - protein, 192 aa, Diaporthe nobilis
  PEPTIDE (1)..(192)
QDTGKLGDAAVINDNPVGAVYKATLPETAFTKSAYPNGGNVKGSVYALSSPDGTGVIFKVKFSGLPSEGGPFIYHLHDQPVPEDGNCTSTLAHLDPYERGETTPCDPNAPQTCQVGDLSGKHGNITGDTDATYTDNFASLKEGIGAFFGNRSLVFHFGNKTRITCANFEAVNAGNTCSGSPSSTASSTGTSA

SEQ ID NO: 43 - protein, 189 aa, Tolypocladium sp. XZ2627
  PEPTIDE (1)..(189)
QDATPVTGNPPGVVYKATLPEAPFFSQAALAGNIKGHITARSPPDGNGVKFTIHFENFPKEGGPFLYHIHVDPAVDGNCTKTGAHLDPFNRGEDPPCDASNPASCQVGDLSGKYGKITKDPFNVEYVDPFVSLKEGDAAFFGNRSFVVHYANKTRITCANFAKKEAPVETGCPETTLSAPTTGPTGTGS

SEQ ID NO: 44 - protein, 162 aa, Aspergillus japonicus
  PEPTIDE (1)..(162)
DTSAPIVWDNNDSVWQVQLLHKDNTTVQGHLKASPGPDNVGITIHAKFWGIPTDQQPLLYHIHKKRVPEDGNCYSTSSHLDPYGRTDTPPCDIKAPQTCEVGDLSGKHGPIWAAPGEPVAVSYTDWFLSNVEDTPGFIGNLSVVVHAADNTRLTCGNFEEAD

SEQ ID NO: 45 - protein, 177 aa, Metarhizium sp. XZ2431
  PEPTIDE (1)..(176)
  mat_peptide (1)..(177)
AQTQDAPVVSNNPHVKYEATLPQNAFFQGNLNGNVRGSVRAGSGPGGVGVEYQVQFTNFPTEGGPFIYHIHVLPVPADGNCTNTLAHLDPYGRGEDPACDSTNPQSCQVGDLSGKYGSITQGPFSATYTDPYSSLQEGTPAFMGNRSIVVHFANKTRITCANFVKVPCDADENGGNM

SEQ ID NO: 46 - protein, 159 aa, Armillaria ostoyae
  PEPTIDE (1)..(159)
DSLVSQAVSVMTGPGQVKGTVIFQQSSVDGPVHITGRIEGLDPSALRGFHVHTSGNLTGGCDSTGEHWNPFNTNHGGLQDPKDQRHVGDLGNVKTDANGVATLDITDDIMSLNGPLSIVGRAIVVHAGTDDLGKGGTPLSLVNGNSGARVSCGVIVSTF

SEQ ID NO: 47 - protein, 261 aa, Trichoderma spirale
  PEPTIDE (1)..(261)
EKDAPVVTGNPHNIEYKATLPKKPFFSDAALAGNVKGYVSAVAAPGGKGVRFSVQFENFPKSGGPFMYHIHEEPAINGNCTSTLAHLDPYHRGETPACDSSKPESCQVGDLSGKYGKITSDPFVAEYFDLYTSLQPGSPAFFGNRSIVVHYANKTRLTCANFAKLPVSNTAANVHTTTSTHHTAIRGPVATGSHHNITRAHSTTSRHNITGPHYTTGAHTTGVSPTSALALTGIVTITSTSFTTVPAGSSASATSSIVPFP

SEQ ID NO: 48 - protein, 193 aa, Aspergillus elegans
  mat_peptide (1)..(193)
GPVPKNAPVIEDNDPEFMYQAKLLDKDNSTVTGQFTAWATDVGVGIKFHVEVEGLPDGSLHYPYHIHEKPVPKDGNCYATGAHLDPYKRGDQPPCDIKAPQTCQVGDLSGKHGPIIAPDDETYEVFYTDYYLSNQKDDPAYFGNLSIVVHAPDNTRLNCANFVPLNTLKSEDSEQSEQSEDSEDPKDPEELDE

SEQ ID NO: 49 - protein, 247 aa, Westerdykella sp. AS85-2
  PEPTIDE (1)..(247)
MWSTSPLVSALFLSAVFASEQPQQPFAFGDMSAPTYTLPPLPYAYDALEPHISAQIMELHHSKHHQTYITNLNAALRSQAEAVHASDITTQVSLQQAIKFNAGGHINHSLFWQNLAPASSAEAKSSSAPTLVNQIKATWGDEEKFREAFKAALLGIQGSGWGWLVKVETGKEQRLAIVTTKDQDPVVGKGEVPIFGVDMWEHAYYLQYLNGKAAYVENIWNVINWKTAEERFKGTRADAFKVLKASI

SEQ ID NO: 50 - protein, 184 aa, Aspergillus sp. XZ2669
  PEPTIDE (1)..(184)
MLAKSLFTGLLGLGLLAQAQDKTAPVVSDNTPWRFYRAELQDKDNTTVRGTVTAWGPSDGVGINLKVNFWGIPEGQTLQYHIHAKAVPEDGNCYATAKHLDPYGRTDTPPCDIKNPNTCEVGDLSGKHSPVWVPSGNSYSVEYTDYFLSNVEGAEAFFGDLSVVVHAPDSSRLNCGNFKGFFDH

SEQ ID NO: 51 - protein, 249 aa, Preussia terricola
  PEPTIDE (1)..(249)
MRTVVTSLVWLSAAFNVLASEPPQQPFEFGIMGEPTVYHLPVLPYSYNALEPSISAQIMELHHSKHHQTYITNLNAALKAQAGAVHTADIATHISLQQAIRFNGGGHINHALFWENLTPAKSPGADPKSAPKLMQKIKETWGSDDKFREDFKTTALGIQGSGWVWLIKNQLGQEQRLAIVTTKDQDPVVGKGEVPVFGVDMWEHAYYLQYQNGKAAYVDNIWNVINWKTAEERFLGTREDAFRTLKASM

SEQ ID NO: 52 - protein, 178 aa, Kionochaeta sp.
  PEPTIDE (1)..(178)
MQKTSFLNVLSLVALAAAQTTGKLGDAHPVTNNEVGDVWIATFNGASIKGTVKTEAKAVGVDYTLNITGLPTAQGPFKYHVHHDPVPASGDCGGTGGHLDPFQRGDTPACNSTAPQTCQVGDLSGKYGSVPGPSVSKSFNDPYSALNIIDLQYIGSRSIVFHDANSTRIACATLVKST

SEQ ID NO: 53 - protein, 248 aa, Kionochaeta sp.
  PEPTIDE (1)..(248)
MRFTTAVSALLTAVGVAADTSDPVTGAQGNATAVVNNPPGVVYKAVLPATAFDAAAYPNGGNVVGEVVAKAKPDGVGVAFHVKFSNLPSAGGPFLYHIHVNPVGDDGNCTKTLAHLDPFVRGETPACDASLPQTCQVGDLSGKYGKITSDPFEANYTDLFASTLPGIGAFFGNRSLVVHLGNTTRVTCANFQLVTSGNQTASNSTATATTTAGSATSKPTASVVANSSATTSATTTATHSTVPQTGAL

SEQ ID NO: 54 - protein, 186 aa, Metapochonia bulbillosa
  PEPTIDE (1)..(186)
MRVSTLLVAGLSALTEATRDAPVVDNNPNVIYQATLPKDPFYSGPINGNIHGYVRASRGPEGKGVKYNVHFQNFPKEGGPFIYHIHVNPVPSDGNCTQTLAHLDPYNRGETPPCDASAPQTCQVGDLSGKHGKITQDPFHVEYVDPYTSLQEGTDAFFGTRSIVVHFGNKTRITCANFERVNGCAA

SEQ ID NO: 55 - protein, 274 aa, Xylomelasma sp. XZ0718
  PEP (1)..(274)
  PEPTIDE (1)..(274)
MRTSSLLAVVTAAAGVVAQDAVAAGPTTGALGNATVVTNNPPGEVYVATLPDTAFDKDAFPDGGNIKGEVAATASPNGIGVVFTVRFSNLPKGLGPFPYHIHDAPVPDDGNCTATLAHLDPFLRGEDPTCNSNLPQTCQVGDLAGKHGRINSDPFEATYTDDFASTLPGIGAFFGNRSIVVHFPNKTRITCANFKLAAGTANIPTTNSTSTSSTNGTFSASATPSSSAAQLTGAGAGTLNPSQSVTTVSAASLVSAASWSLGAASLFAAIMFML

SEQ ID NO: 56 - protein, 257 aa, Preussia flanaganii
  PEPTIDE (1)..(257)
MKGKSTLPTLLLSLLSFPSVNRVLGSDLPQQPFEFGEMSAPNFRLPPLPYAYDALEPHISAQIMELHHSKHHQTYVTNLNAAYRSQSEAVHASDLTTQVSLQQAIKFNAGGHINHSLFWQNLAPASSNDAKSSSAPKLLKQIKATWGDEEKFREAFKAALLGIQGSGWGWLVKVETGKEQRLVIMTTKDQDPVVVGQGIPIFGVDMWEHAYYLQYLNGKAAYVENIWNVINWKTAEERFLGSRVDIFESLKPFTGGS

SEQ ID NO: 57 - protein, 247 aa, Westerdykella sp-46156
  PEPTIDE (1)..(247)
MWSASRLVSALFLSAAFASEQPQQPFAFGEMSAPTYTLPPLPYAYDALEPHISAQIMELHHSKHHQTYITNLNAALRSQAEAVHAYDITTQVSLQQAIKFNAGGHINHSLFWQNLAPANLAEAKSSSAPTLVNQIKATWGDEEKFREAFKAALLGIQGSGWGWLVKVETGKEQRLAIVTTKDQDPVVGKGEVPIFGVDMWEHAYYLQYLNGKAAYVENIWNVINWKTAEERFKGTRADAFKVLKESI

SEQ ID NO: 58 - protein, 269 aa, Trichoderma hamatum
  PEPTIDE (1)..(269)
MASRAILLAALSLLPLGCYSSSQDPSKPEFASIEINPPYDSESPIGQTRFVESFEPTMSVGTFSLPALPYAYDALEPSISAQIMELHHSKHHQAYVTNLNTALKTYATAIAANDVPSQIALQAAIKFNGGGHINHSLFWENLSPSSSPDADSASAPALTAEIAKTWGSLKEFQDAMVKALLGIQGSGWGWLVKDGNALRIVTTKDQDPVVGGEVPIFGIDMWEHAYYLQYLNGKAAYVENIWKVINWKTAEQRFKGDRDDAFKILKASL

SEQ ID NO: 59 - protein, 151 aa, Mycothermus thermophilus; identical to SEQ ID NO: 21
  PEPTIDE (1)..(151)

SEQ ID NO: 60 - protein, 228 aa, Cephalotrichiella penicillata
  PEPTIDE (1)..(228)
MSATLFRTAPALRAALRAKPVAAMATTSFVRGKATLPDLSYDYGALEPYISGKIMELHHSKHHQTYVNGLNSALEAVDEAKNKGDFTKAASQAPLINFHGGGHLNHSLFWENLAPSNKDGGGEPDGTLKAAINEDFGSVDTLRKQMNTSLAGIQGSGWAWLVKDKTTGTLSVVTRANQDPVTGNLAPLLGIDAWEHAYYLQYENRKAEYFEAIWNVVNWKTVAKRFEN

SEQ ID NO: 61 - protein, 233 aa, Chaetomium megalocarpum
  PEPTIDE (1)..(223)
MSATLLRTVPALRGALRAAGAPKAAGAMASTSFVRGKATLPDLPYDYGALEPHISGKIMELHHSKHHQTYVNGLNSALQTIAEAESKGDFTKAASVAPLLNFHGGGHINHSLFWENLAPASREGGGEPDGALKKAIDSDFGSFDTFRSQMNTALAGIQGSGWAWLVKDKSAGTLGLVTRANQDPVSGPYVPLMGIDAWEHAYYLQYENRKAEYFDAIWNVINWKTVASRYEKS

SEQ ID NO: 62 - protein, 227 aa, Chaetomium thermophilum var. thermophilum
  PEPTIDE (1)..(227)
MSASLFRTVLARHGALAAKRSLAGNSFVRGKATLPDLKYDYGALEPYISARIMELHHSKHHQTYVNGLNSALEAIAEAEAKGDFTKAASLAPLLNFHGGGHLNHTLFWENLAPASREGGGEPDGALKKAIEADFGSFETFRKQMNAALTGIQGSGWAWLAKDKDSGNLAIVTRANQDPVTGQLVPLMGIDAWEHAYYLQYENRKAEYFEAIWNVINWKTVAQRFEKA

SEQ ID NO: 63 - protein, 230 aa, Humicola hyalothermophila
  PEPTIDE (1)..(230)
MSATLFRTTPLVRAASGALKRTGAMASTSFVRGKATLPDLPYDYGALEPHISGKIMELHHTKHHQTYVNGLNSALETIAEAESKGDYTKAASMAPLLNFHGGGHLNHSLFWENLAPASREGGGEPDGALKKAIDTDFGSFDAFRKQMNTALAGIQGSGWAWLVKDKASGTLGVVTRANQDPVTGGLVPLMGIDAWEHAYYLQYENRKAEYFDAIWNVINWKTVASRFDKA

SEQ ID NO: 64 - protein, 233 aa, Subramaniula anamorphosa
  PEPTIDE (1)..(233)
MSSTLFRTVPALRGALRASGVAKTAGAMASTSFVRGKATLPDLQYDYGALEPYISGKIMELHHSKHHQTYVNGLNSALQTIAEAESKGDFTKAATVAPLLNFHGGGHINHTLFWENLAPASRDGGGEPDGALKKAIDSDFGSFDTFRKQMNTALAGIQGSGWAWLVKDKSAGTLGLVTRANQDPVSGPYVPLMGIDAWEHAYYLQYENRKAEYFDAIWNVINWKTVASRFEKS

SEQ ID NO: 65 - protein, 227 aa, Sphingobacterium sp. T2
  PEPTIDE (1)..(227)
MMKMNIFKTALVATALFATQTTFAQFKQTPLPYAYDALEGAIDAKTMEIHYSKHAAGYTANLNKAIAGTPAEKESIENILAKVSQYSDAVRNNAGGHYNHELFWSILTPNKGTKPSAALQKAIDETFGSLDALKEKINAAGAARFGSGWAWLIVDNGGKLQVTSTPNQDNPLMDFTKEKGTPILGIDVWEHAYYLRYQNKRADYLTTIWDVINWEEVSARYEKALKK

SEQ ID NO: 66 - protein, 211 aa, Trichoderma rossicum
  PEPTIDE (1)..(211)
MRASGILAVLSLAVSGCIAEKDAPIVTGNPHSVEYKATLPKKPFFSNAALVGNVKGYVSAVAAPSGKGVRFSVQFENFPKSGGPFMYHIHEEPATNGNCTSTLAHLDPYHRGETPACDSSKPETCQVGDLSGKYGKITSDPFVAEYFDLYTSLQPGSPAFFGNRSIVVHYANKTRLTCANFAKLPVSDTATKAHTTTSAHHTVIHGPAASG

SEQ ID NO: 67 - protein, 218 aa, Trichoderma lixii
  PEPTIDE (1)..(218)
MRASGILAVLSLAVSSCVAEKDAPVVTGNPQSVEYKATLPKKPFFAGADLAGNVKGSVSAVAAPGGKGIRFRVQFENFPKSGGPFMYHIHEEPATNGNCTTTLAHLDPYHRGETPACDSSKPETCQVGDLSGKYGKITSDPFVAEYFDLYTSLQPDNPAFFGNRSIVVHYANKTRLTCANFAKLPVSSAATKSHTTTSAHHTVHGPVATGSPHNVTGA

SEQ ID NO: 68 - protein, 218 aa, Trichoderma sp-54723
MRPSGILAVLSTAVLGCVAAKDAPVVTGNPQSVEYKATLPKKPFFSDAALVGNVKGSVSAAAAPGGKGVRFTVQFENFPTKGGPFMYHIHEEPATNGNCTSTLAHLDPYNRGETPACDASKPETCQVGDLSGKYGKITSDPFVAEYFDLYTSLQPGSPAFFGNRSIVVHYANKTRLTCANFAKLSASNTVTKVAHTTTHHSAIHAPIATGTHHNITSA

SEQ ID NO: 69 - protein, 182 aa, Aspergillus niveus
  PEPTIDE (1)..(182)
MLSKSILAGLVGLTLCVNAHTEAPIVEDNSTADFYHAQLQIKDNSTIRGYMTAWTNSKEGMDFRVVVTGIEGHQALPYHIHEKPVPEDGNCYATGAHLDPYGRGEDPPCDIRNPATCQLGDLSGKHAPAFGPDGAEFMAEFRDFFLSNVPGNPAYFGNLSWVVHAPDKTRLNCGNFKKIVPE

SEQ ID NO: 70 - protein, 185 aa, Aspergillus templicola
  PEPTIDE (1)..(185)
MRATSLLTGLLGLGALVHAQDKTAPVVTDNKPWRTYTAELQDKDNTTLRGQVTTYGPTDGVGIRLKVSFWGIPEGETLQYHIHAKPVPEDGNCYATAKHLDPYGRTDTPPCDIKNPASCEVGDLSGKHGPVWVPSGHSFNAEYTDYFLSNVEGEEAFFGDLSVVVHASDTSRLNCGNFKGFFESD

SEQ ID NO: 71 - protein, 185 aa, Pochonia chlamydosporia var. spinulospora
  PEPTIDE (1)..(185)
MRLSTLLLAGCAALTQATDAPIVDNNPNTIYQAVLPKDAFYHGKLNGNIRGSVRASRGPHGKGVKYNIHFDNFPKEGGPFIYHVHVNPVPSDGNCTKTLAHLDPYHRGEDPPCDASKPKTCQVGDLSGKFGHIAGGPFRAEYIDPYSSLIEGTDAYIGSRSIVVHFANKTRITCANFERVSGCAA

SEQ ID NO: 72 - protein, 310 aa, Trichoderma sp-54723
  PEPTIDE (1)..(310)
MRPSGILAVLSTAVLGCVAAKDAPVVTGNPQSVEYKATLPKKPFFSDAALVGNVKGSVSAAAAPGGKGVRFTVQFENFPTKGGPFMYHIHEEPATNGNCTSTLAHLDPYNRGETPACDASKPETCQVGDLSGKYGKITSDPFVAEYFDLYTSLQPGSPAFFGNRSIVVHYANKTRLTCANFAKLSASNTVTKVAHTTTHHSAIHAPIATGTHHNITSAHNTTRPHNTTGPHYTTGPHHTTGVVSPTDILTLTGIVTAPGSPTTSATLTTVPAGSSASATSSIVPFPGAASGNKVSIYLLSGVVAVMFFSL

SEQ ID NO: 73 - protein, 303 aa, Trichoderma sp-44174
  PEPTIDE (1)..(303)
MRASGILTVLSLAVSSCVAEKDAPVVTGNPDNVEYKATLPKKPFFSDAALVGNVKGSVSAVAAPGGKGVRFSVQFENFPKSGGPFMYHIHEEPATNGNCTSTLAHLDPYHRGETPACDSSKPETCQVGDLSGKYGKITSDPFVAEYFDLYTSLQPDSPAFFGNRSIVVHYANKTRLTCANFAKLPVSNAATKSHTATSAHHTVHGPVATGAHHNITGAHNTTSRHNTTGPRYSTGPHHTTSISPTGALTDIVTTTSTSFTTVPAGSTASATSSVVPFPGAASGNRVSIFSLLSGVVAVVFFSL

SEQ ID NO: 74 - protein, 186 aa, Metapochonia suchlasporia
  PEPTIDE (1)..(186)
MRASTLLIAGLSALAQATRDAPVVDNNPNVIYQAILPKDAFYHGPIHGNIRGSVRASRGPDGKGVKYNVHFENFPKEGGPFIYHLHVNPVPGDGNCTKTLAHLDPYGRGEDPPCDASAPQTCQVGDLSGKHGKITQDPFRAEYVDPFSSLQDGTDAFFGNRSIVVHFGNKTRITCANFERVSGCAA

SEQ ID NO: 75 - protein, 186 aa, Metarhizium marquandii
  PEPTIDE (1)..(186)
MRFSALVTAGFLALTQAAQDAPKVDHNPHVTYEAILPKEAFYHGKLDGNVRGSVLASRGPHGKGVKFDVQFRNFPKEGGPFLYHIHVNPVPSDGNCTKTLTHLDPYGRGETPPCDPSQPQQCEVGDLSGKHGKIMQDPFSMQYIDPYASLTEGTPAFLGNRSIVVHFGNKTRITCANFQRVAGCGA

SEQ ID NO: 76 - protein, 209 aa, Diaporthe nobilis
  PEPTIDE (1)..(209)
MRMSIATAILAAASASAQDTGKLGDAAVINDNPVGAVYKATLPETAFTKSAYPNGGNVKGSVYALSSPDGTGVIFKVKFSGLPSEGGPFIYHLHDQPVPEDGNCTSTLAHLDPYERGETTPCDPNAPQTCQVGDLSGKHGNITGDTDATYTDNFASLKEGIGAFFGNRSLVFHFGNKTRITCANFEAVNAGNTCSGSPSSTASSTGTSA

SEQ ID NO: 77 - protein, 209 aa, Tolypocladium sp. XZ2627
  PEPTIDE (1)..(209)
MRVQGLFAVLSAAVAAQAASQDATPVTGNPPGVVYKATLPEAPFFSQAALAGNIKGHITARSPPDGNGVKFTIHFENFPKEGGPFLYHIHVDPAVDGNCTKTGAHLDPFNRGEDPPCDASNPASCQVGDLSGKYGKITKDPFNVEYVDPFVSLKEGDAAFFGNRSFVVHYANKTRITCANFAKKEAPVETGCPETTLSAPTTGPTGTGS

SEQ ID NO: 78 - protein, 183 aa, Aspergillus japonicus
  PEPTIDE (1)..(183)
MWSKTLSLASLGLLCLQATAADTSAPIVWDNNDSVWQVQLLHKDNTTVQGHLKASPGPDNVGITIHAKFWGIPTDQQPLLYHIHKKRVPEDGNCYSTSSHLDPYGRTDTPPCDIKAPQTCEVGDLSGKHGPIWAAPGEPVAVSYTDWFLSNVEDTPGFIGNLSVVVHAADNTRLTCGNFEEAD

SEQ ID NO: 79 - protein, 193 aa, Metarhizium sp. XZ2431
  PEPTIDE (1)..(193)
MRLSTLLGGSFSALAFAQTQDAPVVSNNPHVKYEATLPQNAFFQGNLNGNVRGSVRAGSGPGGVGVEYQVQFTNFPTEGGPFIYHIHVLPVPADGNCTNTLAHLDPYGRGEDPACDSTNPQSCQVGDLSGKYGSITQGPFSATYTDPYSSLQEGTPAFMGNRSIVVHFANKTRITCANFVKVPCDADENGGNM

SEQ ID NO: 80 - protein, 177 aa, Armillaria ostoyae
  PEPTIDE (1)..(177)
MFKSILLALAVALPVLSSDSLVSQAVSVMTGPGQVKGTVIFQQSSVDGPVHITGRIEGLDPSALRGFHVHTSGNLTGGCDSTGEHWNPFNTNHGGLQDPKDQRHVGDLGNVKTDANGVATLDITDDIMSLNGPLSIVGRAIVVHAGTDDLGKGGTPLSLVNGNSGARVSCGVIVSTF

SEQ ID NO: 81 - protein, 305 aa, Trichoderma spirale
  PEPTIDE (1)..(305)
MRASGILAILSLVMSGCVAEKDAPVVTGNPHNIEYKATLPKKPFFSDAALAGNVKGYVSAVAAPGGKGVRFSVQFENFPKSGGPFMYHIHEEPAINGNCTSTLAHLDPYHRGETPACDSSKPESCQVGDLSGKYGKITSDPFVAEYFDLYTSLQPGSPAFFGNRSIVVHYANKTRLTCANFAKLPVSNTAANVHTTTSTHHTAIRGPVATGSHHNITRAHSTTSRHNITGPHYTTGAHTTGVSPTSALALTGIVTITSTSFTTVPAGSSASATSSIVPFPGAASGNRVSILSLLSGVVAVMFFSL

SEQ ID NO: 82 - protein, 215 aa, Aspergillus elegans
  PEPTIDE (1)..(215)
MRCLSLVSSALLGFSLAATVSAGPVPKNAPVIEDNDPEFMYQAKLLDKDNSTVTGQFTAWATDVGVGIKFHVEVEGLPDGSLHYPYHIHEKPVPKDGNCYATGAHLDPYKRGDQPPCDIKAPQTCQVGDLSGKHGPIIAPDDETYEVFYTDYYLSNQKDDPAYFGNLSIVVHAPDNTRLNCANFVPLNTLKSEDSEQSEQSEDSEDPKDPEELDE

SEQ ID NO: 83 - protein, 307 aa, Trichoderma reesei
  PEPTIDE (1)..(307)
MRPSGFLAVLSTALVGYAAAKDAPVVIDNPQGVEFKASLPKKPFFAGAALVGNVKGSVSATAGPAGKGVRFRVQFENLPKTGGPFLYHIHEEPAVNGNCTSTLAHLDPYHRGETPACNASEPQTCQVGDLSGKYGKITSDPFVAEYFDLYTSLQPGSPAFFGNRSIVIHYANKTRLTCANFAKLPVPAATTVPSTTGAHHTAIHGPLATGGAQHNLTGSHNTTGHHNFTSPHRTTGAASPSDVYTLTSVVTVPGSPTTSSSLTTTDDAGSGGASATSSVVPFPGAASGNRVSLSLLSGVVAAIFFSL

SEQ ID NO: 84 - protein, 206 aa, Aspergillus versicolor
  PEPTIDE (1)..(206)
MNLKFLPAAVLGLLISTTAAQDNNADTTDTDTNAPVITDNEPLSFHHASLLKKENTTVYGAITITTRRESAAVQVDVSIGGIPEGEYLNYHIHAARVPDDGNCYLTGAHLDPHGRGQEPPCTITAPQTCEVGDLSGKHGPAWAPAGEEFRATYSDFFLANTPGDDAYYGDLSWVVHGSNGDRLTCGNFDGFSGGGFGNWGGQKSKA

SEQ ID NO: 85 - protein, 154 aa, Aspergillus deflectus
  PEPTIDE (1)..(154)
MAAVFAIANITGIVSGIVSFSQASPGTPVSVGGVLQGLAPGLHGFHVHESPISNGDCATAGSHFNPFHVNHGGPTAEVRHVGDLGNIQADDNGFSILNIQDTHIQLSGEQNILGLSVVIHADPDDLGLGGYPDSLTTGHAGARVACADIVVPGV

SEQ ID NO: 86 - protein, 188 aa, Aspergillus egyptiacus
MYFKVFTGAFLGLVLAVSAQDSSTHAPVITNNMPISLYRATLLQKDNTTVYGGIFIGSQGSESASQIDIFLGGIPEGEHLNYHIHQYPVPENGNCYQTGAHLDPYGRGQTPPCDITAPHTCEVGDISGKHGPAFAPPGEVFSASFPDFFLSNNDDKPAFFGNRSFVVHGSGGERLTCGNFEEVDISND

SEQ ID NO: 87 - DNA, 705 bp, Aspergillus versicolor
atgaacctcaaattcctaccagccgccgtcctcggcctcctgatctcaaccaccgcagcccaagacaacaacgccgacaccactgataccgacacaaatgcccccgtcataaccgacaacgagcccctctccttccaccacgcatccctgctcaagaaggaaaacaccaccgtctacggcgccatcacaatcaccacgcgccgtgagtccgctgctgtccaggtcgacgtgtccatcggcggtatccccgagggtgaatatctgagtacgtctttcttttccctcatctatctaactaaccaacataaataaactagttacacctcaagctaattattgatactaccagactaccacatccacgccgcccgcgtccccgacgacggaaactgctacctaacaggcgcccatctcgacccccacggccgcggccaagagcccccctgcaccatcacagcgccgcagacctgcgaagtcggcgatctgagcggcaagcatggccccgcgtgggcgcctgcaggcgaggagttccgcgcgacctacagcgatttcttcctggcgaatacgcctggcgatgatgcttattatggtgatttgtcgtgggtggtgcatgggtcgaatggggaccggttgacgtgtggcaattttgatgggttttccgggggtgggtttgggaattggggtgggcagaagtcgaaggcttaa

SEQ ID NO: 88 - DNA, 799 bp, Aspergillus deflectus
  gene (1)..(799)
atggctgctgtttttgctagtaagtctatctggttcgctgagatctccaagcacaggcaatccccttttgattctggggtttgtctttcttccatcgaatcgaccacttattgggattacgaatcgcctgaatcgcgggatatctaacgcctctaatagttgctaacattacgggcattgtctcggggattgtgagcttctcccaggccagcccagggaccccagtcagtgttggcggcgtccttcagggcctggcgcccggtttacacggattccacgtccacgaaagtcccatcagcaacggcgattgcgcgaccgctggcagccattgtacgtttttgccttcgcagcatatcatcgttgaatcacttgcttacatagctgtattcctcaccagtcaaccctttccacgtgaaccacggcggccctacagcggaggtccgccacgtcggtgacctgggcaacatccaggctgacgacaacggcttttcgatcctcaacatccaggatactcatatccaattgtcaggggagcagaacatactcggtgtaagtcctttccagggaacactctcgtacaggagaaggatgtgaggaaggttcgggttcaactgacgtctccatcagctttccgtcgttattcatgccgatccggatgatcttggcctgggagggtacccagactccctgaccactggtcacgctggggctcgtgttgcttgtggtatgtgtttaacttcagtttagattgaaagggctgctaactggagtagctgatatcgtggttcccggagtttga

SEQ ID NO: 89 - DNA, 634 bp, Aspergillus egyptiacus
  gene (1)..(634)
atgtatttcaaagtcttcacaggtgccttcctaggcctggtccttgcggtttccgctcaggacagcagcacccatgcccccgtcatcacgaacaacatgcccatctcgctttaccgcgctacccttctccagaaggataacacaactgtctacggcggcattttcatcggctcgcagggaagcgagtccgcctcgcagatcgacatatttctcgggggcatcccagaaggcgagcacctcagtatgtatccgacttcaaccatcttgaacctgagcacaggcctaaccagatacaatcgctgaaccagactaccatatccaccaatatccggtcccagaaaacggcaactgctaccagactggtgcccatcttgacccctacggtcgcggccaaacgcccccctgcgacatcactgcgccccatacctgtgaagtcggtgacatcagcggcaagcacgggcctgcatttgcaccccccggtgaggttttcagcgcctcgtttccggacttctttctttcaaacaacgatgataagcctgcattctttgggaatcgctcctttgtggtccatgggtccggtggtgagaggctgacttgcggtaactttgaggaggttgatatttccaatgattga

SEQ ID NO: 90 - DNA, 854 bp, Westerdykella sp. AS85-2
  gene (1)..(854)
atgtggtccacttcaccacttgtatctgcattgttcctcagcgctgtcttcgcatccgaacaacctcaacaaccgtttgcgttcggcgacatgtctgcaccgacctatacccttccaccgctcccatacgcttatgatgtaagtctgaaacggcactactggccttcctcagacctgatcgttcaattccccaggccctggaaccccacatctccgctcagataatggagctgcaccacagcaagcatcaccagacatacataacaaacctcaatgctgctcttcggtcccaggccgaggccgtgcatgcctccgacatcaccacccaggtttccttgcagcaagccatcaagttcaatgcaggaggccacatcaaccactccctcttttggcagaatctcgcccctgccagctcggcggaggccaagtcgtcgtcagcgccgacactggtgaaccagatcaaggctacgtggggtgatgaggagaagttcagggaggcgttcaaggccgctctcctgggcattcagggcagcggatggggatggcttgtcaaggttgaaacgggcaaggaacagaggcttgctatcgtgactaccaaggatcaggatcctgtcgtcgggaagggggaagttcctatctttggtgtcgacatgtgggagcatgcgtactaccttcaggtgagacctcccgtacttaacctcattggatgcttattgctgacggatatacagtatctcaatggtaaggctgcgtacgttgagaacatctggaatgtcatcaattggaagacagcagaggagcgcttcaagggcactcgtgccgacgctttcaaggttctcaaggcgtctatttag

SEQ ID NO: 91 - DNA, 710 bp, Aspergillus sp. XZ2669
  gene (1)..(710)
atgctggccaagtcgctgtttacgggcctcctcggactgggtctcctggcccaggcccaggataagaccgcccccgtcgtctccgacaacacgccctggcgcttctaccgcgcggaactccaggacaaggacaacaccaccgtccggggaaccgtcacggcctggggaccctctgatggggtcggaatcaacctcaaggttaacttctggggtattccggagggccagactctgcgtatgttactgacccccttccttgccctaccggccgagctgcatacctgcctcatacatgcatcgtcgccaatgcgccaacgcacttcaccaccccgcaatggacaattcagcagacatgagaaggaatgatatgctgacgttgatggatgatagaataccacatccacgctaaagccgtccccgaagatggcaactgctatgcgaccgcaaagcatctcgacccttacggccgcaccgacactcccccctgcgacatcaagaaccccaacacctgcgaagtgggcgacttgagcgggaagcactcccccgtctgggtgcccagcggaaacagttacagcgtcgagtacaccgattacttcctgtccaatgtggagggggcggaggccttctttggcgatttgtccgtggtggtgcatgcgcccgatagctcgcggttgaactgtggtaactttaagggcttctttgatcattga

SEQ ID NO: 92 - DNA, 859 bp, Preussia terricola
  gene (1)..(859)
atgaggaccgtcgtcacctccttggtctggctgtccgcagcattcaacgtcctcgcatcagagccgcctcaacaaccctttgaattcggaataatgggcgagcctactgtataccaccttccggtcctaccatactcatacaatgtaagtatcacgtgccatggttgaggacggatgatctcatacgcagggaaccaggcgttggaaccttccatttccgctcagattatggagctccatcacagcaagcaccatcagacgtacattaccaatctgaatgccgctctcaaggctcaagctggtgccgtgcacaccgcagatattgcgacccatatctctctccagcaagctattaggttcaatggcggtggccacatcaaccatgcgcttttctgggagaacctcacacctgccaaatcccccggcgcagatcccaagtcggcaccaaagttgatgcagaagattaaggagacgtggggtagtgatgataagttccgagaagacttcaaaacgacggctctgggtatccagggcagcggctgggtttggttgatcaagaaccagcttgggcaggagcagagactcgccattgtaaccacaaaggatcaagatccagttgtcggaaagggagaggtcccagtgtttggtgtcgacatgtgggagcatgcctactatcttcaggtgatctttcctacaaatagaccatcttcgtctatattgctaacacctctcccagtatcaaaacggcaaagccgcctatgtggacaacatttggaatgttatcaactggaagactgctgaagagcggttcctcggtacacgcgaagacgccttcaggacattgaaagcgtctatgtaa

SEQ ID NO: 93 - DNA, 663 bp, Kionochaeta sp.
  gene (1)..(663)
atgcagaagacgtctttcctgaacgtgttgagcctggtcgctctggctgcggcgcagactacggggaagcttggcgacgcgcaccctgtcaccaacaacgaggtgggagatgtgtggatcgcaacgttcaacggagcctccatcaaaggcaccgtcaagaccgaggccaaggctgtcggcgtcgactatacattgaacattacggggctccctactgcccagggaccgtttagtaagcgaaacctttgtaaacccctttttttttccttctagcagagtggcaagctgacagggcggtttatagagtaccacgttcaccacgacccagtgccggccagcggagactgtggcggaactgggggtcatctcgaccccttccaacgcggagacacgccagcctgcaacagcactgcgccgcagacgtgccaggttggagatctctctggcaagtatggatcggtcccgggacctagcgtatccaagtcgtaagtgcaaccgagagctacttgggagatgaagatcctgaccattgcccgaagattcaacgacccgtactcggccctcaacataatcgacctgcaatacattggcagcaggtccattgttttccacgacgccaactcgacgagaatcgcctgcgccacgctcgtcaaaagcacctaa

SEQ ID NO: 94 - DNA, 927 bp, Kionochaeta sp.
  gene (1)..(927)
atgcgcttcacgactgctgtctcggctcttctcactgccgtgggcgtggctgccgacacctctgaccccgtcactggagctcaggggaatgccaccgctgtagtcaacaaccccccgggagtcgtgtacaaggccgtccttcctgccaccgcctttgacgcggctgcgtacccgaatggaggcaacgtggtcggagaggtggttgccaaagctaagccggacgggtatgttatcaccacgctgggcgatgtggattttaattccttgactgggggctgataaatattatacagagttggcgtcgcgtttcacgtgaagttcagcaatcttccttcagctggtggtcccttccgtgagttttcccctccttcgcttcacaacctccatgcacctgggtgcttaggtgccttcgccggccgctacttggattgctaaccttcgggctttcgcccacggctaatagtgtaccacattcatgtgaacccggtcggggatgacgggaactgcaccaagacacttgcgcacttggaccccttcgtgcgtggtgagacgcccgcctgcgacgcgtcgctccctcagacgtgccaggtcggtgatctgtctggcaagtatggcaagattacgtcggaccccttcgaagccaactacacagacctgtttgcgtcgacactgccgggcatcggagctttcttcgggaatcgcagtctggtcgtccacctcggtaacacaacccgagtgacctgcgccaacttccagctcgtcaccagcggcaaccagaccgcgagtaactcgaccgccactgctaccaccaccgccggtagcgcgacttcgaagcccacggcgtcagtcgttgccaactcctcagctacgacgtctgccacgacgaccgccactcactcgacggtgcctcaaaccggcgcactgtaa

SEQ ID NO: 95 - DNA, 628 bp, Metapochonia bulbillosa
  gene (1)..(628)
atgcgcgtctcaactcttctcgtcgccgggctgtctgccctcactgaagctactcgggatgctcccgttgtcgacaacaaccccaacgtcatctaccaggccactcttcccaaggaccccttctacagcggtccgattaacggcaacattcacggctacgtgcgtgcctctcgtggtcctgagggcaaaggtgtcaagtacaatgttcactttcagaactttcccaaggaaggcgggccatttagtacgtgccctttatttcacacaattgcacacaatcttatcaagtaactatattaacaatcctgcagtctaccacattcacgtcaaccccgtccccagcgatggcaactgcacccagacacttgcccatctcgacccttacaaccgcggcgaaactcctccttgcgatgccagcgccccccagacttgccaagtcggcgatttgagcggcaagcatggcaagattacgcaggacccgttccacgtggagtacgtcgacccgtatacttcattgcaggaaggcacggatgcattctttggaactaggtcgattgtggtgcactttgggaacaagacgaggattacttgtgccaactttgagagggtcaatgggtgtgcggcttag

SEQ ID NO: 96 - DNA, 951 bp, Xylomelasma sp. XZ0718
  gene (1)..(951)
atgcgtacttcctcgcttctcgccgttgtcaccgccgctgcaggcgttgtggctcaggacgcagtcgccgcgggcccgaccacaggagtatgtcaccataagccattccttctggccctgtgcctccgttgctaacgcgtgtctcccaggccctcggcaatgccaccgtggtcacgaacaacccgcctggcgaggtctacgttgccacgctgcccgacactgccttcgacaaggatgccttccccgacggcggcaacatcaagggtgaggttgcggcgacggccagccccaacggcataggtgtcgtcttcacggtcaggttctccaacctgcccaagggcctgggccccttccgtaagttgctcacccgcgctccgcgtcaacgtggctagaggctttgctgaccatcctgccacagcctaccacatccatgacgctcctgtccccgatgacggcaactgcacggccaccctggcgcacttggatcccttcctccgtggcgaggaccccacgtgcaacagcaacctgccgcagacctgccaggtgggcgacctcgccggcaagcacggaaggatcaactcggaccccttcgaggccacttacacggacgacttcgcgtcgacgttgccgggcataggagccttcttcggcaaccgcagcatcgtcgtgcacttccccaacaagacgcgcatcacctgtgccaacttcaagctggcagctggcacggcgaacatcccgacgaccaacagcacgagcacgagcagcacgaacggaacattcagcgccagcgccacccccagcagcagcgctgcccagctcacgggcgctggagccggaacgctgaacccttcgcagtcggtcaccaccgtttcggccgccagccttgtgagcgcggcgtcgtggagccttggcgcggcttcgctctttgcggcgatcatgttcatgctatga

SEQ ID NO: 97 - DNA, 882 bp, Preussia flanaganii
  gene (1)..(882)
atgaagggaaaatctacattgccgacactactcctttcgctcctctcttttccctcggtcaaccgtgttcttggatccgatcttcctcaacaaccttttgaattcggagaaatgtctgcacccaattttaggctccctcccctcccgtatgcctacgatgtgagtttcctcgagaatttctacattctcttccatggtagtctcatcggtcgttaggcattggaaccgcatatctcagcacagatcatggagctacatcatagcaagcaccatcaaacatacgtcacgaacttgaacgctgcatacaggtcccaaagtgaggccgttcacgcctctgatcttaccactcaagtttctcttcagcaagcgatcaaattcaatgccggtggacacatcaaccattcactcttctggcagaatcttgccccagctagctctaacgatgcaaagtcctcttctgccccgaaattgctcaagcagatcaaagctacttggggtgatgaagagaagttccgggaagccttcaaagctgctttattagggatccagggcagtggatggggatggctcgtcaaagtcgagactggaaaggaacagagactcgtaatcatgacgaccaaagatcaggatcccgtcgtggtagggcaagggattccaatcttcggtgtagacatgtgggagcatgcatactaccttcaggtaccaaatcacttctccaatagattattacatgctaacattgaatttaagtacctaaatggcaaggccgcttatgtcgaaaacatttggaacgtcatcaactggaagactgctgaagagcgctttcttggctctcgtgtcgacatattcgagagtttgaaaccatttacggggggttcttaa

SEQ ID NO: 98 - DNA, 920 bp, Cladobotryum sp.
  gene (1)..(920)
atggctcgtcaaggcctcttcctcgcatccctcctcatctttcccttcgcctcatgcgccgcatctgaggatcctacaggttcgaagcctcagtttgccagcatccccgactcccagcaagcccttttggggtcgttctcgtccaccatgtccgtcagcaccttcagtcttccggcgctgccatatgcctatgatgtacgtctttgcggcccctgcgatgctccctccccatcaaagttcatgaacagttgctgaatccctctctacaggctctcgagccgagcatctctgcccagatcatggagcttcaccacagcaagcaccaccagacatatgtcaacaacctcaacaatgccctcaagtcctatttcgtcgccatctctgcaaatgatgtgccatcccagattgccctccaagctgccgtgaagttcaacggtggcggtcacatcaaccactccctcttctgggagaacctatgccccgccacctcaccagatgctgacccgcagagcgcgcctaccttggcggccgagatttccaagacttggggcagcttggagggcttcaaggatgccatgagcaaggcgcttcttggccttcagggcagtggctgggggtggctagtcaaggatgggcgtgccttgcgcatcgtgacgaccaaggatcaggatcccgtcgtcggtggcgaggtgcccatctttggaatcgacatgtgggagcatgcttactacctgcaggtaagcggcccggtaatcccactagtgtctaaccgtaggcatggctaatcttgcgattagtacctgaacggcaaggccgcctatgttgagaatatctggaaggtaatcaactggaagaccgccgagcgccgtttcatcggcgaccgtgacgatgccttcaagattctcaaggcatcgatttaa

SEQ ID NO: 99 - DNA, 854 bp, Westerdykella sp-46156
  gene (1)..(854)
atgtggtccgcttcacgacttgtatctgctttgttcctcagcgctgccttcgcatccgaacaacctcaacagccgtttgcgttcggcgagatgtctgcaccgacctatacccttccaccgctcccatacgcttatgatgtaagtctgcaacggcactcctggccttcttcagacctgatcgttcaattccccaggccctggaaccccacatctccgctcagataatggagctccaccacagcaagcatcaccagacatacataacaaacctcaatgctgctcttcgatcccaggccgaggccgtgcatgcctacgacatcaccacccaggtctccttgcagcaagccatcaagttcaatgcaggaggccacatcaaccactccctcttttggcagaatctcgcccctgccaacttggcggaggccaagtcgtcgtcagcgccgacactggtgaaccagatcaaggctacgtggggtgatgaggagaagttccgggaggcgttcaaggccgctctcctgggcattcagggcagtggatggggatggcttgtcaaggttgagacgggcaaggaacagaggcttgctatcgtgactaccaaggatcaggatcctgtcgtcggaaagggggaagttcctatctttggtgtcgacatgtgggagcatgcgtactaccttcaggtgagacataccgtacttaacctcattggatgcttattgctgacggatataaagtatctcaacggtaaggctgcgtacgttgagaacatctggaatgtcatcaattggaagacagcagaggagcgcttcaagggcactcgcgccgacgctttcaaggttctcaaagaatctatctag

SEQ ID NO: 100 - DNA, 925 bp, Trichoderma hamatum
  gene (1)..(925)
atggcgtctcgggccattctcctcgccgctctgtccctgctgcccctgggctgttattcttcatcccaggatccctccaagccggaattcgccagcatcgagattaaccctccttacgactctgaatcacccatcggccagacacgctttgttgagtcattcgagcccacgatgtctgttggtaccttttcactgccggcactgccctacgcctacgatgtgagtcttatcccggcccatcaaggctctgcatcagctaatcattcccatccaaggccctcgagcccagcatctccgcacagatcatggagcttcatcacagcaagcatcaccaggcctatgttaccaacctgaacactgctctcaagacctacgccaccgccattgctgccaacgatgtgccttcgcagattgctctgcaggctgccatcaagttcaatggtggcggccacatcaaccactctctgttttgggagaatctgtcgccatcctcatcgccggatgcagattccgccagcgcccctgctctgactgctgagattgccaaaacctggggcagcttgaaagaattccaggacgccatggtcaaggctcttctgggtattcagggaagtggctggggctggctggtcaaggatggcaatgccctgcgaattgtgactacaaaggaccaagatcccgtggttggcggagaggttcccatcttcggcatcgacatgtgggagcatgcttactacctgcaggtgagtcccttatcctccagtgtcttgttacaaatatcctcggctcactctgtgattagtacctcaacggcaaggctgcatacgtagagaatatctggaaagtcatcaactggaagactgctgagcagcgcttcaagggagaccgagatgacgcgttcaagatccttaaggcttcattgtag

SEQ ID NO: 101 - DNA, 668 bp, Mycothermus thermophilus
  gene (1)..(668)
gctgtcgctgtcctccgcggtgactccaaggtcactggtaccgtcaccttcgagcaggagtccgagtcggctcctaccaccatcacctgggacatctcgggccacgaccccaatgctctccgtggcttccacatccacactttcggtgacaacaccaacggttgcacttcggctggcccgcactgtaagtacctagcttctgagctgcttgtctccctgaatccgtcgtgcacggtatctaacgctggatttttctgaactagtcaacccccacggcaagactcacggtgccccgaccgatgagaaccgccacgtcggtgatctcggcaacatccagaccgatgacaacggcaactccaagggcaccgttgtcgacaagttcgtcaagctgattggccccgagagcgtcattggcgtacgtatacctttgcaaccacggcgagatacaaggagaaagattgaactgacatgatccaaccagcggactgttgttgtccacgctggcaccgacgacctgggcaagggtggcaacgaggagtccctgaagacgggtaacgctgggccgcgtcctgcttgcggtaagctctcaacattggatggataatcggacatgaaatcatgagactaatgtcattcttctcgcaggtgtcatcggcattgctcagtaa

SEQ ID NO: 102 - DNA, 908 bp, Cephalotrichiella penicillata
  gene (1)..(908)
atgtccgcaacactcttccgcaccgcgcccgccctccgagctgcgctcagggccaagcctgtcgccgccatggccacgacaagcttcgtccgaggcaaggcgacgcttccagacctctcatgttagtagcttacccggtccatccgatagctccgagccgtcctccgagccgaaacacctaccctgcttggaaagatggagggagggttggctctggaaggaacttagcggggaagatgaacgaaagctgacccgaacgccccacagatgactacggtgccctcgagccctacatcagcggcaagatcatggagctgcaccactccaagcaccaccagacctacgtcaacgggctgaactcggcgctcgaggccgtcgacgaggccaagaacaagggcgatttcaccaaggccgcctcgcaggcgccgctgatcaacttccacggcggtggccacctcaaccacagcctcttctgggagaacctggcgcccagcaacaaggacggcggcggtgagcccgacggcaccctcaaggtaaatccacgaaccccccagcccagtccctccttgaggagttaggcgattggtgattgctaatgcacgttataggcggccatcaacgaggactttggctccgtcgacacccttcgcaagcagatgaacacgtccctcgcgggtatccagggcagcgggtgggcgtggcttgtcaaggataagacgacgggcacgctcagcgtcgtcacccgtgccaaccaggaccccgtcacggggaacctcgccccgctgctgggcatcgacgcctgggagcacgcgtactacctgcagtacgagaaccgcaaggcggagtacttcgaggctatctggaatgttgttaactggaagactgtggctaagaggtttgagaactag

SEQ ID NO: 103 - protein, 729 aa, Thermoascus aurantiacus
  peptide (1)..(729)
ACPYMTGELPRSFAENPHAINRRAEGGGGAAAETEKFLSQFYLNDNDTFMTTDVGGPIEDQNSLSAGDRGPTLLEDFILRQKIQRFDHERVPERAVHARGAGAHGVFTSYADWSNITAASFLSAAGKETPVFVRFSTVAGSRGSADTARDVHGFATRFYTDEGNFDIVGNNIPVFFIQDAIQFPDLIHAVKPSPNNEIPQAATAHDSAWDFFSQQPSSLHTLFWAMAGHGIPRSYRNMAGFGIHTFRFVTDDGASKLVKFHWTSLQGKASLVWEEAQAVAGKNADYHRQDLWDAIEAGRYPEWELGVQIMDEEDQLRFGFDLLDPTKIVPEEYVPITKLGKMQLNRNPLNYFAETEQIMFQPGHVVRGIDFTEDPLLQGRLFSYLDTQLNRHGGPNFEQIPINRPRTPIHNNNRDGAAQMYIPLNKAAYTPNTLNNGSPKQANQTVGKGFFTTPGRTASGRLVRAVSSTFADVWSQPRLFYNSLVPAEQQFLINAIRFETAHITSDVVKNNVIIQLNRVSNNLAKRVARAIGVAEPEPDPTLYHNNKTANVGVFGKPLARLDGLQVGVLATVNKPDSIKQAASLKASFAADNVDVKVVAERLADGVDETYSAADAVNFDAILVANGAEGLFARDSFTARPANSTTATLYPAGRPLQILVDGFRYGKPVGALGSGAKALDAAEISTTRAGVYVANSTTDSFINGVRDGLRTFKFLDRFAIDEDAETSHHH

SEQ ID NO: 104 - protein, 713 aa, Aspergillus lentulus
  Peptide (1)..(713)
VCPYMTGELNRRDEVSDGDAAAATEQFLSQYYLSDNDTFMTSDVGGPIEDQNSLSAGERGPTLLEDFIFRQKIQRFDHERVPERAVHARGAGAHGVFTSYGDFSNITAASFLGKEGKQTPVFVRFSTVAGSRGSSDLARDVHGFATRFYTDEGNFDIVGNNIPVFFIQDAILFPDLIHAVKPRGDNEIPQAASAHDSAWDFFSQQPSTMHTLLWAMSGHGIPRSFRHVDGFGVHTFRFVTDDGASKLVKFHWKSLQGKASMVWEEAQQTSGKNPDFMRQDLYDAIEAGRYPEWELGVQIMDEEDQLRFGFDLLDPTKIVPEEFVPITKLGKMQLNRNPRNYFAETEQVMFQPGHIVRGVDFTEDPLLQGRLFSYLDTQLNRHGGPNFEQLPINQPRVPVHNNNRDGARQMFIPLNPHAYSPKTPVNGSPKQANQTVGDGFFTAPGRTTSGKLVRAVSPSFADVWSQPRLFYNSLVPAEKQFVIDAIRFENANVKSPVVKNNVIIQLNRIDNDLARRVARAIGVAEPEPDPTFYHNNKTANVGTFGTKLKKLDGLKVGVLGSVQHPGSVEGASTLRDRLKDDGVDVVVVAERLANGVDQTYSASDAIQFDAVVVAAGAESLFTTSSFTGGSANATTGASSLYPTGRPLQILVDGFRFGKTVGALGSGAAALRNAGIATSRDGVYVAPSVTDDFANGIKEGLSTFKFLDRFPVDH

SEQ ID NO: 105 - protein, 714 aa, Talaromyces stipitatus
  peptide (1)..(714)
ACPMLTGEIPAGSIANPHHLGSRADSNASDETEAFLSEFYLNDNNSFLTTDVGGPIEDQNSLKAGIRGSTLLEDFIFRQKIQRFDHERVPERAVHARGAGAHGVFTSYADWSNITAASFLGAAGKETPTFVRFSTVAGSRGSADTARDVHGFATRFYTDEGNYDIVGNNIPVFFIQDAIQFPDLIHAVKPQPASEIPQAATAHDTAYDFFGQQPSTLHTLFWAMAGHGIPRSFRHVDGFGVHAYRFVTDDGSSKLVKFHWKSLQGRASLVWEEAQATAGKNADFMRQDLFDNIAAGRYPEWELGVQLIEEPDQLSYGFDLLDPTKILPVEQVPITPLGKMQLNRNPLNYFAETEQVMFQPGHIVRGIDFTEDPLLQGRLFSYLDTQLNRNGGPNFEQIPINRPRVPIHNNNRDGFGQMFIPLNDAAYSPNTLSDGNPKQANETVGNGFFTTPGRTANGNLVRAKSPTFADVWSQPGLFYNSLTATEQQFVINALRFELANVASETVKNNFITQINRVNNTLATLVATAIGVNAPEPDPTYYHHNKTSDVGTFGTPLKKIDGLKVGVLASVNDENSISEGQSLARSLADLNVDVVIVAERLAGNVSATYSASDAINFDAVIVTSGAKGLFGPQTFTAVSNTTLYPVGRPTQILVDAFRYGKPVGAVGSASEALTVSDIDTDRSGVITGDLNDEFVKQLSEDLATFKFLDRFTVDE

SEQ ID NO: 106 - protein, 713 aa, Malbranchea cinnamomea
  peptide (1)..(713)
ACPYLSGELDKRQADSSNDAAQATEEFLQQFYLNDNDTYMTTDTGTPIADQQSLSVGERGPTLLEDFIFRQKIQRFDHERVPERAVHARGAGAHGVFTSYGDFSNITAASFLSAEGKQTPVFVRFSTVAGSRGSSDMARDVHGFATRFYTDEGNFDIVGNNIPVFFIQDAIQFPDLIHAVKPKQDNEIPQAATAHDSAWDFFSQQPSTMHTLMWAMAGHGIPRSYRHMDGFGVHTFRFVTDEGQSKLVKFHFKTLQGRASMVWEEAQVISGKNTDFHRQDLFEAIESGTYPEWEFGVQIVDEEDELKFGFDLLDPTKIIPEDLVPVTPLGKLQLNRNPRNYFAETEQVMFQPGHIVRGIDFTDDPLLQGRLFSYLDTQLNRHGGPNFEQLPINQPRVPIHNNNRDGAGQMYIPLNPHAYSPNTLHASSPRQANETHGKGFFTTPGRTPSGTLQRSLSPTFADVWSQPRLFYNSLHPVERQFLVNAIRFETSNLASSVVRKNVIIQLNRISNDLARRVARFIGVEEPQPDEKFYHNNKTVPLGTFGTPLKSLAGLKIGILSSVNSYEEASRIKSALLEKDSSVKVSVVAERLVPGEEGTVAYTAADGTSFDGIIVSNGTADGFTPYASSPLFPAGRPLQILVDAYRYGKPVGAIGDAGLKALDNAGIQEAERDAEKGVFTASDADATFVEDFLDGLKVFRFLERFDIDEDAEDY

SEQ ID NO: 107 - protein, 699 aa, Crassicarpon thermophilum
  peptide (1)..(699)
ACPFADPAAFQKRDDGQSADILENYKVDDSTGYLSSDVGGPISDQASLRAGGRGPTLLEDFIFRQKIQHFDHERVPERAVHARGAGAHGTFTSYADWSNLTAASFLSEAGKKTPVFVRFSTVAGSRGSADTARDVHGFATRFYTDEGNFDIVGNNIPVFFIQDAIQFPDLIHAVKPRPDNEIPQGATAHDSAWDFFSSQPSTMHTLFWAMAGHGIPRSYRHMDGFGVHTFRLVKEDGSSKLVKWHWKTRQGKASLVWEEAQALSGKNPDFHRQDLWDAIESGNGPEWELGVQVVDEDKALAFGFDLLDPTKIIPEELVPVTKLGVMKLDRNPTNYFAETEQIMFQPGHIVRGIDFSEDPLLQGRLFSYLDTQLNRNGGPNFEQLPINMPRAPIHNNNRDGAGQTFIHTNIYPYSPNTLNKGYPLQANQTNGRGFFTAPSRRVTGQLLRELSPTFTDHWSQPRLFYNSLKPVEQQFLINAIRFETSNLRSTTVKQNVLAQLNRVSHDVAVRVAAALGLEAPAADETYYHNNKTAGVSTFGEPLPTIKTLRVGVLATVQKSSNALAQAGQLKAALEQEGLVATVVAESLAEGVDQTYSAADATAFDAVVVVEGAEGLFASTIQATSSLFPAGRPGQILLDAYRWGKPVAVVGKAKGVYKSAGVPAGRDGVYIASAIDAVVEDLKDGLKTFRFTDRFALDDE

SEQ ID NO: 108 - protein, 722 aa, Penicillium emersonii
  Peptide (1)..(722)
VGCPYLTGQLDARDVHNPHEFQRRQDPGDAAASTEQFLSQFYLNDSNSYMTTDVGGPISDQNSLKAGERGPTLLEDFIFRQKIQHFDHERVPERAVHARGAGAHGTFTSYGNWSNITAASFLSAEGKETPVFVRFSTVAGSRGSADTARDVHGFATRFYTDEGNFDIVGNNIPVFFIQDAILFPDLIHAVKPSPDNEIPQAATAHDTAWDFFSQQPSALHTLFWAMSGHGIPRSFRHMDGFGVHTFRFVTDDGASKLVKFHWTSLQGRASLVWEEAQAAAGKNLDYMRQDLYDNIEAGRYPEWELGIQIVDEEDQLKFGFDLLDPTKIIPVEYVPITPLGKLQLNRNPLNYFAETEQIMFQPGHIVRGIDFTEDPLLQGRLFSYLDTQLNRNGGPNFEQLPINRPRVPWHNNNRDGFSQAFIPLNKAAYSPNTLNNGNPKQANQTVGDGFFTTPGRTTSGRLMRTVSSTFSDVWSQPRLFYNSLVPAEQQFLVNAIRFENSNVKSEVVRNNVIIQLNRVDNDLARRVARVIGVAEPEPDPTYYHNNKTANVGTFGTPLKRIDGLKVGVLATVGDPDSISQGQSLSDALSDSKVDVTVVAESFTDGVDALYTNSDATGFDAVIVADGAEGLFTPSSFTAKPTNSFSTTTLYPAGRPLQILVDAFRFGKPVGALGSGAKALDAAGISTSRPGVYVANSTSEAFTDDIEDGLRTFKFLDRFALDE

SEQ ID NO: 109 - protein, 706 aa, Aspergillus versicolor
  PEPTIDE (1)..(706)
ACPFIGGGGGLERRDTNPDATEATEEFLSEYYFDDNDVYLTSDVGGPIEDQQSLKAGERGSTLLEDFIFRQKIQRFDHERVPERAVHARGTGAHGVFTSYGDYSNITAASFLSSKGKETPVFVRFSTVAGSRGSSDLARDVHGFATRFYTDEGNFDLVGNNIPIFFIQDAIQFPDLIHSVKPSGNNEIPQAATAHDAAWDFFSQQPSTMHTLLWAMSGNGIPRSFRHVDGFGVHTFRFVTDHGSTKFVKFHWKTLQGKAGLVWEEAQQISGKNPDYMRQDLYEAIDAGRFPEWELAVQIMDEEDQLRFGFDLLDPTKIVPEEYVPLTKIGKMTLNRNPRNYFAETEQVMFQPGHIVRGVDFSEDPLLQGRLFSYLDTQLNRNGGPNFEQLPINQPRVPVHNNNRDGAGQMFIPLNPNAYSPNTLNKASPKQANQTVGRGFFTAPDRKANGNLVRVKSSTFEDVWSQPRLFYNSLVPAEKQFVVNAIRFENANVKSEVVKKNVIIQLNRISNDLATRVASAIGVDAPEPDQKYYHDNTTVGVGAFGHKLQKLAGLKVAVLASVDADQSFSAATALSAELSDNGVDVVVVAERLAEGVNQTYSASDAIQFDAVVLAPGTEKLFNSTTTASSTLYPAGRPLQILTDAFRWGKPVAALGSSSGALKSASIGQKDDGVYVAKSVNSDFASQLEQGLTVFRFLDRFALDSDK

SEQ ID NO: 110 - protein, 699 aa, Thermomucor indicae-seudaticae
  PEPTIDE (1)..(699)
EENMNHECAFQYGLPGSDAKDLQLERFTIIDAGTQETTNYGVRINNSESLKAGLRGPTLMEDFMMREKIMHFVHARGVGAHGYFESYADWSNITAAKFLSAPGKKTPVFVRFSTVLGFKGSPDTVRDDRGFATRFYTEDGNFDLVGNVIPPFFVQDAIKFPDLIHAAKPEPDTQVPQAGTAHDTAYDFFSSFPETLHTVLWVLSGRGIPRSFRQVEGFGIHTFRLINEEGKAVFVKFIWKPKQGLSNLIWDEAQKIAGKDIDFHRNDLYNAINRGDYPEYELCVQIVPEQDEFKFDFDLLDPTKLIPESIVPVTKLGKLVLNRNVENFFSETEQITLHPGHLVRGIGFTNDPLLQGRLFSYFDTQINRMNSVNFLQIPINRPIVPVHNNQRDGYMQQNIYAGKVAYYPNGLQGNTPALVDPDKGGYIEYPERVSGEKRRGRAPSFFDFYSQPQLFWNSLTEAEKQQLVDGARFEVGKCKSFDVRARFVDQLNHIDNGLARRVAAGVGVPLPEKMYENPGQSSVGISIEEYPKADNIRTRTVAILTAPGTNIEEARTMYGYLAQEGAYVEYIGLYLGDQDGLNITNTYLTTSSVLYDALYVPGGQEGIRKLMDKVSLFPFEEPKVFVMDAFRHGKPIAASSEGVELLMAAEVEIPNHNEDGVAYHEGVVIGNVSPPMEQKFKEALIQQRFWSRLPIDPPI

SEQ ID NO: 111 - protein, 713 aa, Aspergillus fumigatus
  PEPTIDE (1)..(713)
VCPYMTGELNRRDEISDGDAAAATEEFLSQYYLNDNDAFMTSDVGGPIEDQNSLSAGERGPTLLEDFIFRQKIQRFDHERVPERAVHARGAGAHGVFTSYGDFSNITAASFLAKEGKQTPVFVRFSTVAGSRGSSDLARDVHGFATRFYTDEGNFDIVGNNIPVFFIQDAILFPDLIHAVKPRGDNEIPQAATAHDSAWDFFSQQPSTMHTLLWAMSGHGIPRSFRHVDGFGVHTFRFVTDDGASKLVKFHWKSLQGKASMVWEEAQQTSGKNPDFMRQDLHDAIEAGRYPEWELGVQIMDEEDQLRFGFDLLDPTKIVPEEFVPITKLGKMQLNRNPRNYFAETEQVMFQPGHIVRGVDFTEDPLLQGRLFSYLDTQLNRHGGPNFEQLPINQPRVPVHNNNRDGAGQMFIPLNPHAYSPKTSVNGSPKQANQTVGDGFFTAPGRTTSGKLVRAVSSSFEDVWSQPRLFYNSLVPAEKQFVIDAIRFENANVKSPVVKNNVIIQLNRIDNDLARRVARAIGVAEPEPDPTFYHNNKTADVGTFGTKLKKLDGLKVGVLGSVQHPGSVEGASTLRDRLKDDGVDVVLVAERLADGVDQTYSTSDAIQFDAVVVAAGAESLFAASSFTGGSANSASGASSLYPTGRPLQILIDGFRFGKTVGALGSGTAALRNAGIATSRDGVYVAQSVTDDFANDLKEGLRTFKFLDRFPVDH

SEQ ID NO: 112 - protein, 697 aa, Thermothelomyces thermophilus
  PEPTIDE (1)..(697)
ACPFADPAALQRRDDAPPADILEKYKVDDSKGYMSSDVGGPIGDQASLRAGGRGPTLLEDFIFRQKIQHFDHERVPERAVHARGAGAHGTFTSYADWSNLTAASFLSSAGKKTPVFVRFSTVAGSRGSADTARDVHGFATRFYTDEGNFDIVGNNIPVFFIQDAIQFPDLIHSVKPRPDNEIPQAATAHDSAWDFFSSQPSTLHTLFWAMAGNGIPRSYRHMDGFGIHTFRLVKEDGSSKLVKWHWKTRQGKASLVWEEAQAVAGKNADFHRQDLWDAIESGNGPEWELGVQVVDEDKALAFGFDLLDPTKIIPEELVPITPLGVMKLDRNPTNYFAETEQIMFQPGHIVRGIDFSEDPLLQGRLFSYLDTQLNRNGGPNFEQLPINMPRAPIHNNNRDGAGQTFIHTNIYPYSPNTLNKGYPLQANQTSGRGFFTAPGRRVTGELLRELSPTFNDHWSQPRLFYNSLKPVEQQFLINAIRFETSHIRSTTVKQNVLAQLNRVSHDVAARVAAALGLEAPAPDDTYYHDNKTAGLSIFGEPLPTIKTLRVGVLASAQKDSSTLAQAGLLKAALEKDGLVVTVVGESLAEGVDQTYSAADATAFDAVIVAEGAERLFAAAGASSPLFPAGRPGQILLDAYRWGKPVGVIGKAEGAYKSAGVPVGGKGVYTAAGVDAIVKNLEEGLKTFRFTDRFPLDN

SEQ ID NO: 113 - protein, 719 aa, Curvularia verruculosa
  PEPTIDE (1)..(719)
VCPYMDGNSDALPASHPVARRDGASASSTDQFMGQFEIDDSKAYLTNPVGGPIPDQESLSAGERGPTLLEDQIFRRKIMHFDHERVPERAVHARGAGAHGVFQSFGDWSNITGASFLSAPNKETPTFIRFSTVAGSRGSADTARDVHGFAVRFYTDEGNFDIVGNNVPVFFIQDAIKFPDLIHAVKPKPDREIPQAATAHDSAWDFFSQQPSTMHTLMWAMSGHGTIRSYRHTDGFGVHTFRFVRDDGKSKLVKFRFRSLQGKAALLWEEAQTTAGMNADLHRQDLFESIENGYYPEWIFEAQIMEEEDQLRFGFDLLDPTKIVPEDIVPFTPLGKLTLNRNPRNYFAETEQVMFQPGHLVRGIDITDDPLLQGRMYSYLDTQLNRNGGPNFEQIPINQPRVPIHSNERDGAGQMYIPLNTAAYSPNTLNSGFPKQANQQEGRGFFTAPSRSVSGNLVRTVSSTFADAWSQPRLFFNSLSAVEQQFVINAIRFETSQLQSEVVKNNVLIQLNRISHDIATRVAEALGMDAPAADDKFYHNNKTINVNAGGEPLLKIEGLKVGYLTSASSSGENAKALKAALKDKKVGLTVVAEHLGAGIDQTYSAASAVNFDAIIVDGSASGLFAPAGSLANSNSTASTKARSTLYPAGRPLDILQTSYKFGKPVAVLGASNNTLSTAGIEANTPGVYSLDASDMSAVVNKISEGLQTFKFLDRYPLDN

SEQ ID NO: 114 - protein, 697 aa, Mycothermus thermophilus
  PEPTIDE (1)..(697)
TCPFADPAALYRRQDTTSGQSPLAAYEVDDSTGYLTSDVGGPIQDQTSLKAGIRGPTLLEDFMFRQKIQHFDHERVPERAVHARGAGAHGTFTSYADWSNITAASFLNATGKQTPVFVRFSTVAGSRGSADTARDVHGFATRFYTDEGNFDIVGNNIPVFFIQDAIQFPDLIHSVKPRPDNEIPQAATAHDSAWDFFSQQPSTMHTLFWAMSGHGIPRSYRHMDGFGVHTFRFVKDDGSSKLIKWHFKSRQGKASLVWEEAQVLSGKNADFHRQDLWDAIESGNGPEWDVCVQIVDESQAQAFGFDLLDPTKIIPEEYAPLTKLGLLKLDRNPTNYFAETEQVMFQPGHIVRGIDFTEDPLLQGRLFSYLDTQLNRNGGPNFEQLPINMPRVPIHNNNRDGAGQMFIHRNKYPYTPNTLNSGYPRQANQNAGRGFFTAPGRTVSGALVREVSPTFNDHWSQPRLFFNSLTPVEQQFLVNAMRFEISLVKSEEVRKNVLTQLNRVSHDVAGRVAAAIGLAAPDADDTYYHNNKTAGVSILGSGPLPTIKTLRVGILATTSESSALDQAAQLRTRLEKDGLVVTVVAETLREGVDQTYSTADATGFDGVVVVDGAAALFASTASSPLFPTGRPLQIFVDAYRWGKPVGVCGGKSSEVLDAADVPENGDGVYSEESVDKFVEEFEKGLATFRVSLGAFVF

SEQ ID NO: 115 - protein, 710 aa, Mycothermus thermophilus
  PEPTIDE (1)..(710)
ACPYMTGELERRDTGTDDATAATEEFLSQYYMADNDTFLTSDVGGPIEDQNSLQVGDRGPTLLEDFIFRQKIQRFDHERVPERAVHARGVGAHGVFTSYGDYSNITAASFLGAEGKETPVFVRFSTVAGSRGSSDLARDVHGFATRFYTDEGNFDIVGNNIPVFFIQDAILFPDLIHAVKPRGDNEIPQAATAHDSAWDFFSQQPSSLHTLLWAMSGHGIPRSLRHVDGFGIHTFRFVTDNGDSKLVKFHWKSLQGKASMVWEEAQQVSGKNPDFMRQDLFEAIEAGRYPEWELGVQIMDEEDQLKFGFDLFDPTKIVPEEYVPITKLGKMTLNRNPRNYFAETEQVMFQPGHIVRGVDFTEDPLLQGRLFSYLDTQLNRHGGPNFEQLPINQPRVPVHNNNRDGAGQMFIPLNPNAYSPNTLNKGSPKQANQTVGKGFFTAPGRESTGRFTRAVSPSFEDVWSQPRLFYNSLTPAEQQFVVDAIRFENSNVKSSVVRNNVIIQLNRVSNDLARRVARAIGVEEPEADPTYYHNNKTTDVGTFGQKLKKLDGLKVGFLASVETPASIEAASELSKQLSEDGVDVVVVAERLSDGVDQTYSGSDAIQFDAVIVAPGAEGLFSTFSFTAPSNATSSSTLFPAGRPLQIVIDGFRFGKPVGAVGSAATALKNAGIQTSRDGVYVDKSVTSGFVDGIKDGLRTFKFLDRFKLDH

SEQ ID NO: 116 - protein, 714 aa, Penicillium oxalicum
  PEPTIDE (1)..(714)
ACPYMTGETAGLDRRGEKDAASGTEEFLSEFYLKDDENVFLTSDVGGPIEDQNSLKAGERGPTLLEDFIFRQKIQRFDHERVPERAVHARGAGAHGVFTSYGDWSNITAASFLSAEGKETPMFVRFSTVAGSRGSADTARDVHGFATRFYTDEGNFDIVGNNIPVFFIQDAIKFPDLIHAVKPRGDNEIPQAATAHDSAWDFFSQQPSSLHTLLWAMAGHGIPRSFRHVDGFGVHTYRLVTDKGDTKLVKFHWKGLQGKASLVWEEAQQVAGKNGDFMRQDLFDAIEAGRYPEWELGVQIMEEDDQLRFGFDLLDPTKIVPEELVPVVKLGKMTLNRNPMNYFAETEQVMFQPGHIVRGVDFTDDPLLQGRIYSYLDTQLNRHGGPNFEQIPINRPRVPIHNNNRDGAGQMYIPLNPNAYSPNTLNKGSPKQANETVGKGFFTAPGRTSSGKLLRAVSSTFEDVWSQPRLFWNSLVPAEQQFVVDAMRFENANVMSQVVRNNVVIQLNRISNDLAKRVAEAIGVDAPQPDPTYYHDNTTANIGAFGQKLKKLEGLKVGVLASVANASSISQGAALQSQLKDVGVDLVVVGERMAHGVNQTYSASDAINFDAVIVADGAEGLFSTSSSTVSPKAKSSGATSLYPAGRPMDILLDAFRFGKPVGSLGQGSVALENAQISSDRDGVYAAKSVDEDFGDKVKEGLRTFKFLDRFALDE

SEQ ID NO: 117 - protein, 697 aa, Humicola hyalothermophila
  PEPTIDE (1)..(697)
ACPFADAAAFAKRDDSQSSDFFGRYKIDDSDGYMTSDVGGPIEEQFSLKAGIRGSTLLEDFIFRQKIQHFDHERVPERAVHARGAGAHGTFTSYADWSNLTAASFLNAAGKETPVFVRFSTVAGSRGSADTARDVHGFAVRFYTDEGNFDIVGNNIPVFFIQDAIRFPDLIHSVKPSPDSEIPQGATAHDSAWDFFSSQPSTMHTLFWAMAGYGIPRSYRHMDGFGVHTFRFVKDDGSSKLVKFHFKTLQGRASLVWEEAQVLAGKNADFHRQDLWDAIESGNGPEWEFAVQVVDEDKALAFGFDVLDPTKIIPEEFAPLTKLGKLKLNRNPTNYFAETEQVMFQPGHIVRGVDFSEDPLLQGRLFSYLDTQLNRHGGPNFEQIPINMPRVPIHNNNRDGAGQGFIHTNIYPYTPNTLNKGFPKQATREEGRGFFTAPGRTASGQLVRALSPTFDDHWSQPRLFYNSLTPVEQQFVINAMRFETSNVKSVEVRKNVIAQLNRVSHDVASRVAAALGLEAPAPEDQFYHNNVTAGISIFNGTLPTIRTLRVGVLASAGNRAVLGQAAELKERFAADGLVVTVVGEYLADGVDQTYSGADATGFDGVVVVDGAESLFDDKGSKSPLFPVGRPGQILLDAYRWGKPVAGLGKANQALRSVGVPTNNAPGVFVESGVEELVKAFEGGLQTFRFTDRFALDE

SEQ ID NO: 118 - protein, 723 aa, Thermoascus crustaceus
  PEPTIDE (1)..(723)
ACPYMTGELPRSFAENPHDIHRRAEGGGAADETEKFLSRFYLNDNDTFMTSDVGGPIAEQNSLSAGERGPTLLEDFIFRQKIQHFDHERVPERAVHARGVGAHGVFTSYGNWSNITAASFLAAEGKETPVFVRFSTVAGSRGSADTARDVHGFATRFYTDEGNFDIVGNNIPVFFIQDAILFPDLIHAVKPSPENEIPQAATAHDSAWDFFSQQPSSLHTLFWAMAGHGIPRSFRTVDGFGIHTFRFVTDDGASKLVKFHWKSLQGKASLVWEEAQAVAGKNADYHRQDLYNAIEAGRYPEWELGVQIMDEEDQLRFGFDVMDPTKIVPEEYVPITKLGKMQLNRNPLNYFSETEQIMFQPGHIVRGIDFSEDPLLQGRLFSYLDTQLNRHGGPNFEQIPINRPRIPIHNNNRDGAAQMYIPLNKAAYSPNTLNNGSPKQANQTVGKGFFTTPGRTANGKLVRSVSSTFADVWTQPRLFYNSLVPAEQQFLINAIRFETAHLKSSVVKNNVIIQLNRVSNNLAKRVARAIGVEEPEPDPTFYHNNKTANVAVFGQPLARLDGLQVGVLASVDKADSIKQAASLKDSFAKDNVDVMVVAERLADGVDLTYSAADAVNFDAILVANGADDLFTRDSFTAKPSNSSSATLYPAGRPLQILVDGFRFGKPVGAFGSGAKALDAAEISTKRAGVYVADSTSDDFVKGVKDGLRTFKFLDRFAIDEDAE

SEQ ID NO: 119 - protein, 702 aa, Thielavia australiensis
  PEPTIDE (1)..(702)
ACPFANTGALNEKRDDSQSPDFLDKYKVDDSEGFMTSDVGGPIGDQFSLKAGIRGSTLLEDFIFRQKIQHFDHERVPERAVHARGAGAHGTFTSYADWSNLTAASFLNAAGKKTPVFVRFSTVAGSRGSADTVRDVHGFATRFYTDEGNFDIVGNNIPIFFIQDAIHFPDLIHAVKPRPDNEIPQAATAHDSAWDYFSSQPSTMHTLFWAMAGYGIPRSFRHMDGFGVNTYRFVKEDGSSTLIKWHLKTLQGKASLVWEEAQAVAGKNPDFHRQDLWDAIESGNHPSWELAVQVADEDKALAFGFDLLDPTKFIPEELAPLTRLGVMTLDRNPTNYFAETEQVMFQPGHVVRGVDFSEDPLLQGRLFSYLDTQLNRHRGPNFEQLPINMPRIPIHNNNRDGAGQGFIHKNVYHYSPNTLNNGFPLQANQTAGRGFFTAPGRVANGNLVRARSPTFDDHWSQPRLFYNSLTPVEQQLLINAIRFETSHLTSTTVKQNVLAQLNRVSNDVAARVAAALGLEAPAPDPTFYHDNVTAGLSIVNATLPTIKTLRVGVLASTASAGSLAQAAQLKERLAADGVVVSVVAETLGQGADQTYAAADATAFDGVVVADGAEGLFGDAAGPAAASSSLFPAGRPGQILVDAYRWGKPVGALGGAEKALESVGALSGSQPGVLTQSEVEEFVKGFEEGLAKFRFTDRFPLDS

SEQ ID NO: 120 - protein, 766 aa, Thielavia hyrcaniae
  PEPTIDE (1)..(766)
GCPYADVHKRDGLSERADGFSIDTLSTSFGKCPSISDAAGGGTRSHDWWPCQLRLDVLRQFSPQQDPFGGNFDYAAAFATLDYKALKADLKALLTQSQPWWPADFGHYGGLFIRLAWHSAGTYRAIDGRGGGGMGQIRFAPLNSWPDNGNLDKARRLLWPIKQKYGKAISWADLFILAGNVALEEMGFPVLGFGAGRLDTWQSDESVYWGSETTWVPKGNDVRYNGSTDYAGRSSQLEKPLAAAHMGLIYVNPQGPDGNPDPKLSALDIRTTFGRMGMNDSETVALIAGGHAFGKAHGASNAAVGPAPEGAALEAQGFGWANPFGSGNAANTITSGLEVIWSKTPTKWSNNFLTSLFKNEWTLTKSPAGAHQFIALQGSQDYPEPFDNKTFRRPTMLVSDLALREDPTYGAIARAWVDDFPAFTRAFAAAWFKLTHRDMGPVARYLGPEVPKERFIWQDPLPAATSQPISDGEQEKLKADIFALPGITISSLVSVAWASASTFRGGDKRGGANGARIALQPQVSWEVNNPKQLQTVLGALNTLKETFNKSPGGKKQVSLADLIVLAGNAAIEHAAAAAGYKNTRVPFTPGRVDATQSDTDVASFEYLNPQADGFRNFRNFSGWARARTEELLVDKAQQLTLTPPEMTVLVGGMRALGANYDGSSTGVLTSRPGTLSNDFFANLLDVGTVWTAEAASGGEVFTGKDRATGQKKWTASRADLVFGSHAELRAIAEVYAEAGGQDKMVADFVAAWAKVMDLDRFDVKKK

SEQ ID NO: 121 - protein, 701 aa, Neurospora crassa
  PEPTIDE (1)..(701)
ACPFADPSALGRRAEGGEVDARQRLKEVEVDDNGQFMTTDFGGNIEEQFSLKAGGRGSTLLEDFIFRQKLQHFDHERIPERVVHARGAGAHGIFTSYGDWSNITAASFLGAKDKQTPVFVRFSTVAGSRGSADTARDVHGFATRFYTDEGNFDIVGNNIPVFFIQDAIRFPDLIHSVKPSPDNEVPQAATAHDSAWDFFSSQPSALHTLFWAMSGNGIPRSYRHMDGFGIHTFRLVTEDGKSKLVKWHWKTKQGKAALVWEEAQVLAGKNADFHRQDLWDAIESGNAPSWELAVQLIDEDKAQAYGFDLLDPTKFLPEEFAPLQVLGEMTLNRNPMNYFAETEQISFQPGHIVRGVDFTEDPLLQGRLYSYLDTQLNRHRGPNFEQLPINRPVSGVHNNHRDGQGQAWIHKNIHHYSPSYLNKGYPAQANQTVGRGFFTTPGRTASGVLNRELSATFDDHYTQPRLFFNSLTPVEQQFVINAIRFEASHVTNEQVKKNVLEQLNKISNDVAKRVAVALGLEAPQPDPTYYHNNVTRGVSIFNESLPTIATLRVGVLSTTKGGSLDKAKALKEQLEKDGLKVTVIAEYLASGVDQTYSAADATAFDAVVVAEGAERVFSGKGAMSPLFPAGRPSQILTDGYRWGKPVAAVGSAKKALQSIGVEEKEAGVYAGAQDEVIKGVEEGLKVFKFLERFAVDGDDEE

SEQ ID NO: 122 - protein, 729 aa, Thermoascus aurantiacus
  PEPTIDE (1)..(729)
ACPYMTGELPRSFAENPHAINRRAEGGGGAAAETEKFLSQFYLNDNDTFMTTDVGGPIEDQNSLSAGDRGPTLLEDFILRQKIQRFDHERVPERAVAARGAGAHGVFTSYADWSNITAASFLSAAGKETPVFVRFSTVAGSRGSADTARDVHGFATRFYTDEGNFDIVGANIPVFFIQDAIQFPDLIHAVKPSPNNEIPQAATAHDSAWDFFSQQPSSLHTLFWAMAGHGIPRSYRNMDGFGIHTFRFVTDDGASKLVKFHWTSLQGKASLVWEEAQAVAGKNADYHRQDLWDAIEAGRYPEWELGVQIMDEEDQLRFGFDLLDPTKIVPEEYVPITKLGKMQLNRNPLNYFAETEQIMFQPGHVVRGIDFTEDPLLQGRLFSYLDTQLNRHGGPNFEQIPINRPRTPIHNNNRDGAAQMYIPLNKAAYTPNTLNNGSPKQANQTVGKGFFTTPGRTASGRLVRAVSSTFADVWSQPRLFYNSLVPAEQQFLINAIRFETAHITSDVVKNNVIIQLNRVSNNLAKRVARAIGVAEPEPDPTLYHNNKTANVGVFGKPLARLDGLQVGVLATVNKPDSIKQAASLKASFAADNVDVKVVAERLADGVDETYSAADAVNFDAILVANGAEGLFARDSFTARPANSTTATLYPAGRPLQILVDGFRYGKPVGALGSGAKALDAAEISTTRAGVYVANSTTDSFINGVRDGLRTFKFLDRFAIDEDAETSHHH

SEQ ID NO: 123 - protein, 739 aa, Neurospora crassa
  PEPTIDE (1)..(729)
NHTPAAPELVARQKAKEALTSAPSSKKVDDLKNEFKETDKSARLTTDYGVKQTTADDWLRIVSDDKIGPSLLEDPFARERIMRFDHERIPERVVHARGSGAFGKFKVYESASDLTMAPVLTDTSRETPVFVRFSTVLGSRGSADTVRDVRGFAVKFYTEEGNWDLVGNNIPVFFIQDAIKFPDVIHAGKPEPHNEVPQAQSAHNNFWDFQFNHTEATHMFTWAMSDRAIPRSLRMMQGFGVNTYTLINAQGKRHFVKFHWTPELGVHSLVWDEALKLAGQDPDFHRKDLWEAIENGAYPKWKFGIQAIAEEDEHKFDFDILDATKIWPEDLVPVRYIGEMELNRNPDEFFPQTEQIAFCTSHVVNGIGFSDDPLLQGRNFSYFDTQISRLGVNFQELPINRPVCPVMNFNRDGAMRHTISRGTVNYYPNRFDACPPASLKEGGYLEYAQKVAGIKARARSAKFKEHFSQAQLFYNSMSPIEKQHMINAFGFELDHCEDPVVYGRMVQRLADIDLGLAQTIAEMVGGEAPTTTNHPNHGRKTINLSQTEFPPATPTIKSRRVAIIIADGYDNVAYDAAYAAISANQAIPLVIGPRRSKVTAANGSTVQPHHHLEGFRSTMVDAIFIPGGAKAAETLSKNGRALHWIREAFGHLKAIGATGEAVDLVAKAIALPQVTVSSEAEVHESYGVVTLKKVKPESFTDAVKIAKGAAGFLGEFFYAIAQHRNWDRELDGLHSMIAY

SEQ ID NO: 124 - protein, 729 aa, Thermoascus aurantiacus
  PEPTIDE (1)..(729)
ACPYMTGELPRSFAENPHAINRRAEGGGGAAAETEKFLSQFYLNDNDTFMTTDVGGPIEDQNSLSAGDRGPTLLEDFILRQKIQRFDHERVPERAVAARGAGAHGVFTSYADWSNITAASFLSAAGKETPVFVRFSTVAGSRGSADTARDVHGFATRFYTDEGNFDIVGNNIPVFFIQDAIQFPDLIHAVKPSPNNEIPQAATAHDSAWDFFSQQPSSLHTLFWAMAGHGIPRSYRNMDGFGIHTFRFVTDDGASKLVKFHWTSLQGKASLVWEEAQAVAGKNADYHRQDLWDAIEAGRYPEWELGVQIMDEEDQLRFGFDLLDPTKIVPEEYVPITKLGKMQLNRNPLNYFAETEQIMFQPGHVVRGIDFTEDPLLQGRLFSYLDTQLNRHGGPNFEQIPINRPRTPIHNNNRDGAAQMYIPLNKAAYTPNTLNNGSPKQANQTVGKGFFTTPGRTASGRLVRAVSSTFADVWSQPRLFYNSLVPAEQQFLINAIRFETAHITSDVVKNNVIIQLNRVSNNLAKRVARAIGVAEPEPDPTLYHNNKTANVGVFGKPLARLDGLQVGVLATVNKPDSIKQAASLKASFAADNVDVKVVAERLADGVDETYSAADAVNFDAILVANGAEGLFARDSFTARPANSTTATLYPAGRPLQILVDGFRYGKPVGALGSGAKALDAAEISTTRAGVYVANSTTDSFINGVRDGLRTFKFLDRFAIDEDAETSHHH

SEQ ID NO: 125 - protein, 729 aa, Thermoascus aurantiacus
  PEPTIDE (1)..(729)
ACPYMTGELPRSFAENPHAINRRAEGGGGAAAETEKFLSQFYLNDNDTFMTTDVGGPIEDQNSLSAGDRGPTLLEDFILRQKIQRFDHERVPERAVHARGAGAHGVFTSYADWSNITAASFLSAAGKETPVFVRFSTVAGSRGSADTARDVHGFATRFYTDEGNFDIVGANIPVFFIQDAIQFPDLIHAVKPSPNNEIPQAATAHDSAWDFFSQQPSSLHTLFWAMAGHGIPRSYRNMDGFGIHTFRFVTDDGASKLVKFHWTSLQGKASLVWEEAQAVAGKNADYHRQDLWDAIEAGRYPEWELGVQIMDEEDQLRFGFDLLDPTKIVPEEYVPITKLGKMQLNRNPLNYFAETEQIMFQPGHVVRGIDFTEDPLLQGRLFSYLDTQLNRHGGPNFEQIPINRPRTPIHNNNRDGAAQMYIPLNKAAYTPNTLNNGSPKQANQTVGKGFFTTPGRTASGRLVRAVSSTFADVWSQPRLFYNSLVPAEQQFLINAIRFETAHITSDVVKNNVIIQLNRVSNNLAKRVARAIGVAEPEPDPTLYHNNKTANVGVFGKPLARLDGLQVGVLATVNKPDSIKQAASLKASFAADNVDVKVVAERLADGVDETYSAADAVNFDAILVANGAEGLFARDSFTARPANSTTATLYPAGRPLQILVDGFRYGKPVGALGSGAKALDAAEISTTRAGVYVANSTTDSFINGVRDGLRTFKFLDRFAIDEDAETSHHH

SEQ ID NO: 126 - protein, 729 aa, Thermoascus aurantiacus
  PEPTIDE (1)..(729)
ACPYMTGELPRSFAENPHAINRRAEGGGGAAAETEKFLSQFYLNDNDTFMTTDVGGPIEDQNSLSAGDRGPTLLEDFILRQKIQRFDHERVPERAVHARGAGAHGVFTSYADWSNITAASFLSAAGKETPVFVRFSTVAGSRGSADTARDVHGFATRFYTDEGNFDIVGNNIPVFFIQDAIQFPDLIHAVKPSPNNEIPQAATAHDSAWDFFSQQPSSLHTLFWAMAGHGIPRSYRNMDGFGIHTFRFVTDDGASKLVKFHWTSLQGKASLVWEEAQAVAGKNADYHRQDLWDAIEAGRYPEWELGVQIMDEEDQLRFGFDLLDPTKIVPEEYVPITKLGKMQLNRNPLNYFAETEQIMFQPGHVVRGIDFTEDPLLQGRLFSYLDTQLNRHGGPNFEQIPINRPRTPIHNNNRDGAAQMYIPLNKAAYTPNTLNNGSPKQANQTVGKGFFTTPGRTASGRLVRAVSSTFADVWSQPRLFYNSLVPAEQQFLINAIRFETAHITSDVVKNNVIIQLNRVSNNLAKRVARAIGVAEPEPDPTLYHNNKTANVGVFGKPLARLDGLQVGVLATVNKPDSIKQAASLKASFAADNVDVKVVAERLADGVDETYSAADAVNFDAILVANGAEGLFARDSFTARPANSTTATLYPAGRPLQILVDGFRYGKPVGALGSGAKALDAAEISTTRAGVYVANSTTDSFINGVRDGLRTFKFLDRFAIDEDAETSHHH

SEQ ID NO: 127 - DNA, 890 bp, Chaetomium megalocarpum
  gene (1)..(890)
atgtctgcgactctcctccgcaccgtccccgctctgcggggagctctccgagctgccggagctcccaaggccgccggcgccatggctagcacgagcttcgtgcgcggcaaggcgacccttcccgatctgccgtgtgagtagccgcagcaaacacacccacgcccacatgacggcgcacaatggctttatggctcggtcaccaagccggcagaccgggatgatggacgaaagctaattaatgcactctacagacgactacggcgccctcgagccccacatctcaggcaagatcatggagctgcatcactccaagcaccaccagacctacgtcaacggcctcaacagcgccttgcagactatcgctgaggctgagagcaagggcgacttcaccaaggcagcgtcggtcgcccccctcctcaacttccacggtggcggccacatcaaccatagcctgttctgggagaacctggcgccagccagcagagagggtggtggtgagccggacggagctctcaaggtaggtccttccttcacccttcccatgaacctttacgttgtaagtgcaatgctaacaagctcgtccacagaaagcaatcgactccgactttggctccttcgacaccttccgctcacagatgaacacggccctcgctggcatccagggaagcggctgggcgtggctagtcaaggacaagtcggcgggcaccctggggctcgtgacgcgcgcgaaccaggaccccgtgtcgggcccttacgtgccgctgatgggcatcgacgcctgggagcacgcctactacctgcagtacgagaaccgcaaggccgagtactttgacgccatctggaacgtcattaactggaagaccgttgccagccggtacgagaagtcttag

SEQ ID NO: 128 - DNA, 876 bp, Chaetomium thermophilum var. thermophilum
  gene (1)..(876)
atgtctgcttctctgttccgcactgttctcgcccggcatggtgctctcgctgccaagcgctcgctggctggcaacagcttcgtgcgcggcaaggccaccctgcccgacctgaagtgtgagtagcagcttcgcgctctgacattccggatccgattttcgtaatgctgcatgtcccgctggctatggtctaaccaaccgatgtaatgttgcagacgactacggcgccctggagccttatatctcggcccgtatcatggagcttcaccactcgaagcaccaccagacctatgtcaacggcctcaatagcgctctcgaggcaattgctgaagccgaggccaaaggcgacttcaccaaggcggcgtctcttgcccctctgctcaacttccacggtggtggtcacctcaaccacaccctgttctgggaaaaccttgctcctgccagccgcgagggtggtggtgagcccgatggtgccctcaaggtgcgttcaagcaatcctgtgttgttcaagctgtctcggcagggggccgttgacaaagaaccactggctgacgctgcgtttcttgtcaaaaacagaaagccatcgaggctgacttcggctccttcgagaccttccgcaagcaaatgaacgcggcactcaccggcattcagggtagcggctgggcgtggttggcgaaggacaaggacagtggcaacctcgctatcgtgactcgtgccaaccaggatcctgtcacgggtcagcttgtgccgctcatgggcatcgacgcctgggagcatgcctactacctccagtacgagaaccgcaaggccgagtacttcgaggccatctggaacgtcatcaattggaagacggttgcccagcgctttgagaaggcctaa

SEQ ID NO: 129 - DNA, 865 bp, Humicola hyalothermophila
  gene (1)..(865)
atgtctgccacactgtttcgcacgactcctctcgtccgcgccgcttcgggcgctttgaagcgcaccggagccatggccagcacgagctttgtgcgcggcaaggctacgctccccgacctgccgtgtaagtagaagcaacggttggaggccatttacgagcggcatcttgtctttcatttcctcgcgacaaggcagctgacaaatatctttgcgcagacgactacggcgccctcgagccccacatttctggcaagatcatggagctgcaccacacgaagcaccaccagacctacgtgaacgggcttaacagcgcactcgagaccattgccgaggctgaaagcaagggcgactacaccaaggcggcgtccatggcgccgctcctcaacttccacggcggtggccacctcaaccacagcctcttctgggaaaacctggctcctgccagccgggagggcggcggcgagcccgacggagctctcaaggtgcgttgtaaaaccagctgattcgctccaattggcagcggaggaatgacgtactgactcgttcttccgacgccaaacagaaagccatcgacaccgactttggctcgttcgacgccttccgcaagcagatgaacaccgctctggcgggcatccagggcagcggctgggcgtggctggtcaaggacaaggcgagcgggacgctcggggtagtgacgcgcgccaaccaggaccccgttaccggcggcttggtcccgctgatgggcatcgacgcttgggagcatgcctactacctgcagtacgagaaccgcaaagccgagtactttgacgccatttggaacgtcatcaactggaagacggtcgcctcgcgcttcgacaaggcttaa

SEQ ID NO: 130 - DNA, 899 bp, Subramaniula anamorphosa
  gene (1)..(899)
atgtcttccacgctcttccgcactgttccggccctccggggagctctccgcgcgtcgggagttgcaaagacagccggggccatggccagcaccagcttcgtgcgcggcaaggccacgcttccggacctgcagtgtaagtcggcagcactgtgacagacacagcattggaagctttaaagctgcgtcctatcatgcagggcagcaatcaaagctcgggctcgagtgcgcatcatgcagggctaacaaggatatgcagacgactacggcgccctcgagccgtacatctcgggcaagatcatggagctgcaccacagcaagcaccaccagacgtacgtcaacggcctcaacagcgcactgcagaccattgccgaggccgagagcaagggcgacttcaccaaggcggccaccgtcgcgcccctcctcaacttccacggcggcggccacatcaaccacaccctcttctgggagaacctcgctcccgccagccgtgatggcggcggcgagcccgacggcgcgctcaaggtacgttgccgaaacgaacccctccccaggctctagacctggacacagcagcactgacaccacccctcccacagaaagcaatcgactccgacttcggctccttcgacacgttccgcaagcagatgaacacggcgctggcgggcatccagggcagcggctgggcgtggctggtcaaggacaagtcggcgggcacgctgggcctggtgacgcgcgccaaccaggaccccgtgtcgggcccctacgtgccgctgatgggcatcgacgcctgggagcacgcctactacctgcagtacgagaaccgcaaggccgagtactttgacgccatctggaacgtcatcaactggaagacggttgctagccggtttgaaaagtcttga

SEQ ID NO: 131 - DNA, 684 bp, Sphingobacterium sp. T2
  gene (1)..(684)
atgatgaagatgaacatcttcaaaacagctcttgtagctactgcacttttcgcaacacaaacaactttcgctcagttcaaacaaactcctcttccttatgcttacgacgctcttgaaggcgcaatcgacgctaagactatggagatccactattcaaagcatgcggctggctacacagcaaaccttaacaaagccatcgctggcacacctgctgagaaagagtctatcgagaacatccttgctaaagtatcacagtattcagacgcagtacgcaacaacgctggtggccattacaaccatgagcttttctggtctatccttacacctaacaagggcacaaagccgtcagcggcacttcagaaggctatcgacgagacatttggctctcttgacgctcttaaggagaagatcaatgcggctggtgccgctcgctttggctctggctgggcttggcttatcgtagacaatggtggcaagcttcaggttacttctacaccaaaccaggacaaccctcttatggacttcacaaaggagaagggcactccaatccttggcatcgacgtatgggagcatgcgtattaccttcgctaccagaacaaacgcgcagactatcttactacaatctgggacgttatcaactgggaagaggtttcagcacgctatgagaaggctcttaagaagtaa

SEQ ID NO: 132 - DNA, 725 bp, Trichoderma rossicum
  gene (1)..(725)
atgcgagcttctgggatcctggctgtcctttcactcgccgtgtcgggctgtatcgctgagaaagatgcccccatcgtcaccggcaatcctcacagcgtcgaatacaaggccactctgcccaaaaagcccttcttctccaacgcggcgttggtaggcaatgtcaagggctatgtttctgccgtggctgctcctagtggcaagggtgtcaggttcagcgtccaatttgaaaacttccccaaaagcggcggtccctttagtgagtagattctttttcttttctttttccttctcagtcaattgcgatgtggcggcatcatagtggctaaccaacccccttgtatgcagtgtaccacatccacgaggagccggctaccaatggtaactgtacgtcaacgctggcgcatctggacccatatcatcgtggcgagacacctgcctgcgactcttccaagcctgaaacctgtcaggtcggcgatctgagtggaaagtacggcaagatcacctcggatcccttcgttgcggagtactttgacctctacacttcactccagcccggcagcccggccttctttggcaatcgatcgattgtcgtccactatgcaaacaaaacgcggctgacgtgcgccaactttgccaagctgccggtgtctgatactgccacaaaggcccacacgaccaccagtgctcatcatactgtcatccatggtccggctgcttctggctga

SEQ ID NO: 133 - DNA, 745 bp, Trichoderma lixii
  gene (1)..(745)
atgcgagcctctggaatcttggctgttctttctctcgccgtgtcgagctgcgtcgcagagaaagatgcccccgtcgttaccggcaatcctcagagcgtcgaatacaaggccactctgcccaaaaagcccttcttcgccggcgctgatctggcgggcaacgtcaagggctctgtttctgccgtggctgctcctggcggcaagggcatcaggttccgcgtccaattcgaaaacttccccaaaagcggtggcccctttagtgagttttgtttgcttctttttgcttccctagccaaaggcgatgcgacggccgtcatggtggctaaccattccccccttgtatgcagtgtaccacatccacgaagagccggctaccaacggtaactgtacgacgaccctggctcatctggacccgtatcatcgtggcgagacgcccgcttgcgattcttccaagcccgagacttgccaggtcggcgatctgagtggcaagtacggcaagatcacctcggatccgttcgtggccgagtactttgacctctacacctctcttcagcccgacaacccggccttctttggcaatcgatcgatcgtcgtccattatgccaacaagacgcggctgacgtgcgccaactttgccaagctgccggtgtcgagtgctgccacaaaatcgcatacgaccaccagtgctcatcatacggtccatggccctgttgctaccggttctcctcataatgttactggtgcttga

SEQ ID NO: 134 - DNA, 725 bp, Trichoderma sp-54723
  gene (1)..(725)
atgcggccttctgggatcctggccgtcctttctaccgctgtgttgggctgtgtcgcagcgaaagatgcccccgtcgttaccggcaatcctcaaagcgtcgaatacaaggccactctgcccaaaaagcccttcttctccgacgctgcgctggtgggcaacgtcaagggctctgtttctgccgcagctgctcctggtggcaagggcgtcaggttcaccgtccaattcgaaaactttcccacaaagggcggccccttcagtgagtcctcttctggtcaaatggcgatgtggaggcatcgcagtggctaaccaaccccatgtatgcagtgtaccacatccacgaggagccagctaccaatggcaactgtacgtcgaccctggcgcatctggacccgtataatcgtggcgagacacctgcctgcgatgcttctaagcctgagacttgccaggtcggcgatctgagtggaaagtacggcaagatcacctcggatcccttcgtggccgagtactttgacctctacacgtctctccaaccaggtagcccggccttctttggcaaccgatcgattgtcgtccattacgcaaacaaaacgcggctgacgtgcgccaactttgccaagctgtcggcgtctaatactgtcacaaaggtggcccacactaccactcatcattctgccatccatgctcccattgcgactggcactcatcataacatcactagcgcttga

SEQ ID NO: 135 - DNA, 608 bp, Aspergillus niveus
atgctgtcgaaatcgatcctcgcgggcctcgtcggcctcacgctctgcgtcaacgcgcataccgaagcccccatcgtggaagacaattccacggcggatttctaccatgcccagctgcagatcaaggacaactccactatcagggggtatatgaccgcttggaccaacagcaaagaaggcatggacttccgggttgttgtgaccggaatcgagggccaccaagctctgcgtatgtgatcgtcttcccatccaatacatccatggcgagggagctgaccgtcaaccaagcatatcacattcacgaaaagcccgtccccgaggatggtaactgctacgccacgggcgcccacctcgatccatacggtcgcggcgaagacccgccctgcgacatcagaaacccggcgacgtgccaactgggtgacctgagtggaaagcatgccccggcctttgggcccgacggcgccgaattcatggccgagttccgggactttttcctgtccaatgtgcccggaaacccagcctactttggaaatctctcgtgggtggtgcacgcgcccgataagacgagactcaactgtggcaactttaagaagatcgtccccgagtga

SEQ ID NO: 136 - DNA, 697 bp, Aspergillus templicola
  gene (1)..(697)
atgcgggccacatcgttgttgaccggcctcctcggcctcggtgccctcgtccacgcccaggacaagaccgcccccgtcgtcaccgacaacaagccctggcgcacctacaccgccgagctgcaagacaaggacaacaccactctgcgcggacaagtgacgacctatggcccgaccgatggcgtcggaatccgcttgaaggtgtcgttctggggaattcccgagggcgagactctgcgtatgtcatacatgcccctctacctgcctacctacctaccttacaaataacctaatgcacaccacaccacaccaccaccagcagcaaaagccaccagtcacaaaatcatggcaattatactgataacatgagacgatagaataccacatccacgcaaaacccgtccccgaagacggcaactgctacgctaccgcaaagcacctcgacccctacggccgcaccgacacgcccccctgcgacatcaagaacccggcctcctgcgaggtcggcgacctgagcggcaagcatggccccgtctgggtgcccagtggccacagcttcaacgccgagtacaccgattacttcctgtcgaatgtggaaggcgaggaggcgttctttggcgatctgtctgtcgtcgtgcatgcgtccgatacgtcgcggttgaactgtgggaactttaaaggtttcttcgagagtgactga

SEQ ID NO: 137 - DNA, 609 bp, Pochonia chlamydosporia var. spinulospora
  gene (1)..(609)
atgcgcctgtcaaccctcctcctcgctgggtgcgctgccctcacccaagccactgacgcccccatcgtcgacaacaaccccaacaccatctaccaagccgtcttgcccaaggacgccttctaccacggcaaactcaacggcaatatccgcggctctgtgcgtgcgtctcgcggccctcacggtaagggcgtcaagtacaacattcactttgacaactttcccaaggaaggcggcccattcagtgagttactaacatcttccctcttactctcccatatctaacacactacagtctaccacgtccacgtcaatcccgtcccttcagacggcaactgcaccaagaccctcgcccatctcgacccgtaccaccgcggcgaggatcctccctgcgatgcgagcaaaccgaagacctgccaggtcggtgacctgagcggcaagtttggccatattgcgggcggtccattccgcgcagagtacatcgatccgtatagctctttgatcgaggggactgatgcgtatatcgggagcaggtcgattgtggtgcattttgcgaataagacgcggattacgtgtgctaattttgagagggtttcgggttgtgctgcttga

SEQ ID NO: 138 - DNA, 924 bp, Trichoderma sp-44174
  gene (1)..(924)
atgcgagcttctggtatcctgactgtcctctctctcgccgtgtcgagctgtgtcgcagagaaagacgcccccgtcgtcactggcaatcctgataacgtcgaatacaaggccactctgcccaaaaagcccttcttctccgacgctgctctagtgggcaatgtcaagggctctgtttccgccgtagctgctcctggcggcaagggcgtcaggttcagcgtccaattcgaaaacttccccaagagcggcggcccctttagtgagtttgcttctttgcttcttccctagtcaaaggcgatgcggcggcgtcatagtggctaaccaacccccttgtatgcagtgtaccacatccacgaggagccagctactaatggcaactgtacgtcaaccctggctcatctggacccgtatcatcgtggcgaaacacccgcttgcgattcttctaagcccgagacttgccaggtcggcgatctgagtggaaagtatggcaagatcacttcggatcccttcgtggccgagtactttgacctctacacgtctctccagcccgacagcccggccttctttggcaatcgatcgatcgtcgtccattatgcaaacaaaacgcggctgacatgcgccaactttgccaagctaccggtgtctaatgctgccacaaagtcgcacactgccaccagtgctcatcatacagtccatggccccgttgctactggcgctcaccataacatcactggcgctcataacaccacgagtcgtcacaataccacggggcctcgttattccactggtcctcaccacaccacaagtatttctcctacaggtgctctcactgacatcgtcactaccacctcgaccagctttactaccgtccctgctggaagtactgcaagtgccacgtcatccgttgtgcctttccccggagcttga

SEQ ID NO: 139 - DNA, 1004 bp, Trichoderma rossicum
  gene (1)..(1004)
atgcgagcttctgggatcctggctgtcctttcactcgccgtgtcgggctgtatcgctgagaaagatgcccccatcgtcaccggcaatcctcacagcgtcgaatacaaggccactctgcccaaaaagcccttcttctccaacgcggcgttggtaggcaatgtcaagggctatgtttctgccgtggctgctcctagtggcaagggtgtcaggttcagcgtccaatttgaaaacttccccaaaagcggcggtccctttagtgagtagattctttttcttttctttttccttctcagtcaattgcgatgtggcggcatcatagtggctaaccaacccccttgtatgcagtgtaccacatccacgaggagccggctaccaatggtaactgtacgtcaacgctggcgcatctggacccatatcatcgtggcgagacacctgcctgcgactcttccaagcctgaaacctgtcaggtcggcgatctgagtggaaagtacggcaagatcacctcggatcccttcgttgcggagtactttgacctctacacttcactccagcccggcagcccggccttctttggcaatcgatcgattgtcgtccactatgcaaacaaaacgcggctgacgtgcgccaactttgccaagctgccggtgtctgatactgccacaaaggcccacacgaccaccagtgctcatcatactgtcatccatggtccggctgcttctggcggtcgtcacaacaccacaagttctcacaacatcacgggccctcattacaccactggctctcaccacaccacagatgtctctcctacaggttctctcaatccgactggcatcgttactgcaccgggcagtcctaccactccggccaccttcactaccgttgctgctgggggtagtgcaagtgccacgtcatctatcgtgcctttcccaggagctgcctcggggaatagagtgtccctcgctctgctgagtggcgttgttgctgccatgttcttctccctgtga

SEQ ID NO: 140 - DNA, 1001 bp, Trichoderma sp-54723
  gene (1)..(1001)
atgcggccttctgggatcctggccgtcctttctaccgctgtgttgggctgtgtcgcagcgaaagatgcccccgtcgttaccggcaatcctcaaagcgtcgaatacaaggccactctgcccaaaaagcccttcttctccgacgctgcgctggtgggcaacgtcaagggctctgtttctgccgcagctgctcctggtggcaagggcgtcaggttcaccgtccaattcgaaaactttcccacaaagggcggccccttcagtgagtcctcttctggtcaaatggcgatgtggaggcatcgcagtggctaaccaaccccatgtatgcagtgtaccacatccacgaggagccagctaccaatggcaactgtacgtcgaccctggcgcatctggacccgtataatcgtggcgagacacctgcctgcgatgcttctaagcctgagacttgccaggtcggcgatctgagtggaaagtacggcaagatcacctcggatcccttcgtggccgagtactttgacctctacacgtctctccaaccaggtagcccggccttctttggcaaccgatcgattgtcgtccattacgcaaacaaaacgcggctgacgtgcgccaactttgccaagctgtcggcgtctaatactgtcacaaaggtggcccacactaccactcatcattctgccatccatgctcccattgcgactggcactcatcataacatcactagcgctcataataccacacgtcctcacaataccacaggccctcattacaccaccggtcctcaccacaccacaggcgtcgtctctcccacagatattctcactcttaccggtatcgtcactgctcctggcagtcctaccacttcggcgaccttgactaccgtccctgctgggagtagcgcaagtgccacgtcatccattgtgcctttcccaggagctgcctctggaaataaagtgtccatctatctgctgagtggcgttgttgctgtcatgttcttctccctgtga

SEQ ID NO: 141 - DNA, 993 bp, Trichoderma sp-44174
  gene (1)..(993)
atgcgagcttctggtatcctgactgtcctctctctcgccgtgtcgagctgtgtcgcagagaaagacgcccccgtcgtcactggcaatcctgataacgtcgaatacaaggccactctgcccaaaaagcccttcttctccgacgctgctctagtgggcaatgtcaagggctctgtttccgccgtagctgctcctggcggcaagggcgtcaggttcagcgtccaattcgaaaacttccccaagagcggcggcccctttagtgagtttgcttctttgcttcttccctagtcaaaggcgatgcggcggcgtcatagtggctaaccaacccccttgtatgcagtgtaccacatccacgaggagccagctactaatggcaactgtacgtcaaccctggctcatctggacccgtatcatcgtggcgaaacacccgcttgcgattcttctaagcccgagacttgccaggtcggcgatctgagtggaaagtatggcaagatcacttcggatcccttcgtggccgagtactttgacctctacacgtctctccagcccgacagcccggccttctttggcaatcgatcgatcgtcgtccattatgcaaacaaaacgcggctgacatgcgccaactttgccaagctaccggtgtctaatgctgccacaaagtcgcacactgccaccagtgctcatcatacagtccatggccccgttgctactggcgctcaccataacatcactggcgctcataacaccacgagtcgtcacaataccacggggcctcgttattccactggtcctcaccacaccacaagtatttctcctacaggtgctctcactgacatcgtcactaccacctcgaccagctttactaccgtccctgctggaagtactgcaagtgccacgtcatccgttgtgcctttccccggagctgcctcgggaaatagagtgtccatcttctctttgctgagtggcgttgttgccgtcgtgttcttctccctgtga

SEQ ID NO: 142 - DNA, 634 bp, Metapochonia suchlasporia
  gene (1)..(634)
atgcgcgcctcaactcttctcattgccgggctatctgccctcgcccaagccacccgggatgctcccgttgtcgacaacaaccccaacgtcatctaccaggctattctgcccaaggacgccttttaccacggtccgattcacggcaacattcgtggctctgtgcgtgcctcgcgtggacctgatggaaagggcgtcaagtacaatgttcactttgagaactttcccaaagaaggcgggccattcagtacgttttacctcattttcaggcagttacagatgcacaaaagcgaattgaagtatattaacaattcttgcagtttaccaccttcacgttaaccccgtccccggcgatggcaactgcaccaaaacacttgcccacctcgatccctacggccgcggcgaagaccctccctgcgatgctagcgccccccagacctgccaggtcggcgatttgagcggaaagcatggcaagattacacaggatccgttccgtgccgagtacgtcgatccgtttagttcgttgcaggacggtacggatgcgttctttggaaacaggtcgattgtggtgcactttgggaacaagacgaggattacttgtgcaaactttgagagggtcagtgggtgtgcggcttag

SEQ ID NO: 143 - DNA, 623 bp, Metarhizium marquandii
  gene (1)..(623)
atgcgcttctcagccctcgtcactgccggcttcttggcccttacccaagccgctcaagatgctcccaaagtcgaccataacccccacgtcacctatgaggctattctccccaaggaagccttctaccacggcaaacttgacggcaatgttcgcggctccgtacttgcttcgcgcggtccacacggcaagggcgtcaagttcgacgttcaatttagaaatttccccaaggagggaggaccattccgtatgctcatgctcacacctacgcatcccatgattggcagttgcttacacggaggatgatagtttaccacattcacgttaacccggtgccctctgatggcaactgcaccaagactctcacccatctcgacccttatgggcgcggcgaaactcccccctgcgatcccagccagccgcagcagtgcgaggttggcgatctgagcggcaagcatggcaagattatgcaggacccgtttagcatgcaatacatcgatccgtatgcctcgctgaccgaaggcacgccggctttcttgggcaaccgctcgatcgtggtgcactttgggaataagacgaggatcacctgtgctaattttcagagggtcgcaggatgcggcgcgtag

SEQ ID NO: 144 - DNA, 733 bp, Diaporthe nobilis
  gene (1)..(733)
atgcgcatgtcaattgccaccgccatcctggctgctgccagcgcctcagcccaagacactggcgttcgtcaaatcttatcctcttcccactggatctgcctgctgaccctgttctagaaacttggagatgccgcagtcatcaacgacaaccctgtcggagctgtgtacaaggcgactctgccggaaacggcctttaccaagagcgcgtatcccaacggcggcaacgtgaagggctccgtatacgccctgtccagcccagatggcaccggtgtgatcttcaaggtcaagttctctggactccccagcgagggcggtcctttcagtaagtctggcacgctgtcaacatctggatctccactaacaagcgacagtctaccacctccatgaccagcctgttccagaagatggaaactgcacttcaacgctggctcaccttgacccttatgagcgtggagagacgaccccgtgcgaccccaatgctccccagacctgccaggttggcgatctgtctggaaagcacggcaacatcactggtgacactgacgccacctacaccgacaactttgcttccctcaaggagggcatcggcgccttcttcggcaaccggagtctcgtgtttcacttcgggaacaagacccgcatcacttgtgccaacttcgaggctgtcaatgctggaaacacatgcagcggcagtccctcctcgaccgcgtccagcacgggcacatcggcctaa

SEQ ID NO: 145 - DNA, 681 bp, Tolypocladium sp. XZ2627
  gene (1)..(681)
atgcgcgtacaaggactcttcgccgtcctctcggcggccgtcgcagcacaggctgcttctcaagacgccacgcccgtcaccggcaaccctccgggagtcgtgtataaggccaccttgcccgaggcgcccttcttctctcaagcagctctcgccggaaacatcaagggtcacatcactgcgcggtcccctccggatgggaatggagtcaagttcaccatacacttcgagaacttccccaaggaaggtggcccctttcgtaagtcgctcgctcacggtgcacgcccaggccgagactaaccaggtgcagtgtaccacattcacgtcgatcctgctgtcgacggcaactgcaccaagactggcgcccatctcgaccctttcaaccgcggcgaggaccccccttgcgacgcgtcgaacccggcgtcgtgccaagtcggtgacctgagcggcaagtacggcaagatcacgaaggaccctttcaacgtcgagtacgttgacccgttcgtctcgctcaaggagggcgatgccgccttcttcgggaacaggtccttcgtggttcactacgccaacaagacgcgcatcacctgcgccaactttgccaagaaggaggctccggtcgagactgggtgccctgaaaccaccctgtcggcgccaactaccggcccaaccggcacgggcagctga

SEQ ID NO: 146 - DNA, 635 bp, Tolypocladium sp. XZ2627
  gene (1)..(635)
atgtggtcgaagactctctcgctggcctcactgggcctcctttgcctccaggccaccgcggccgacaccagtgcgcccattgtatgggacaacaacgactccgtctggcaggttcagcttttgcacaaggacaataccactgtccagggtcatctcaaagcgagtcctggacccgataatgtcggcataacgattcatgccaagttctggggtattcccacggatcaacaacctctgcgtatgtcttgcatttcccagagagctttcgcctcgatcggctgattagcccgtttcttgctaacgggtacctcccgtttttagtataccatattcacaagaagcgggtgcccgaagacggcaactgctacagcaccagcagtcaccttgacccctatggccgcaccgatacgcctccctgcgacatcaaggcgcctcagacctgcgaggtcggcgacctcagcggaaagcatggtccgatctgggcggctcctggcgaaccggtcgcagtctcatacaccgactggttcctgtccaacgttgaggatacgcccggattcattggaaatctgtccgtggtggtgcatgcggccgacaacactcggctgacatgtgggaatttcgaggaggccgactga

SEQ ID NO: 147 - DNA, 664 bp, Metarhizium sp. XZ2431
  gene (1)..(664)
atgagactctcaactctcctcgggggctcattctcggcccttgcgttcgcacaaacccaagatgcccctgtagtttcaaacaacccccatgtcaagtatgaagctacccttccgcagaatgccttctttcaaggcaacttgaacggcaatgttcgcggttcagtgcgtgcggggagcggtcctggaggcgttggtgtcgagtatcaagtccagttcacaaactttcccacggaaggcggaccattcagtaagtcctcgatggcccatgagacggccgtcaacctcccgaagaaatataattttgccctaacacttgctccactacatagtataccacattcatgtgctccctgttccggccgatggcaactgcacaaacacgctggcccatcttgatccgtacggacgaggcgaggatcctgcctgcgattccacgaatccccagtcttgccaagtgggagatttgagcggcaaatatggaagcataacgcagggccccttctccgcaacatataccgatccgtactcgtccttgcaagagggcactcctgcgtttatggggaataggtcgattgtggtgcattttgcgaacaagacgcggattacttgcgccaattttgtcaaggttccatgtgatgctgacgagaatgggggaaatatgtga

SEQ ID NO: 148 - DNA, 749 bp, Armillaria ostoyae
  gene (1)..(749)
atgttcaagtcaatattactcgcactcgcagtcgctctccccgtcttatcctcggattctttagtttcccaggtaccccgtccaatcaactactcctctttggatgctgaccaccaatatacaggctgtctccgtcatgaccgggccaggtcaagttaaggggactgtaatattccaacaatccagcgtcgacggacccgttcacataacggggcgcatcgaaggcctcgatccttctgcactaagaggcttccatgtccagtacgtttaacgtctctttccctttgctgttttaactgtttcgtagcacctctggaaacctcaccggcggctgtgactctacaggggaacattggaatcccttcaacaccaaccatggcggtctccaggatcccaaggaccaaagacatgtaggcgatctcggaaatgtcaaaaccgatgcgaacggtgtagcgactttggatataactgatgatatcatgtcgctcaatgggccgctgagtattgtcgggtacgtttttctttgtgcgaagttgaaagatgtatgttgacgaaattttgcagacgtgctattgttgttcacgctggtacggatgacttgggtaaaggtggaactcctctgtcgcttgtaaatggcaattctggagcgagagtttcgtgtggcgttattggtacgtttgtgtcaaggtgttcgaagttgttctgacaaagggaacttttttaggattgtcatagtttcgaccttctaa

SEQ ID NO: 149 - DNA, 917 bp, Trichoderma spirale
  gene (1)..(917)
atgcgagcttctgggatcctggctattctttctctcgtcatgtcgggctgtgtcgcagagaaagatgcccccgtcgttaccggcaatcctcacaacatcgaatacaaagccaccctacccaaaaagcccttcttctccgacgctgctctggcgggcaatgtcaagggctatgtttctgccgtagctgctcctgggggcaagggcgtcaggttcagcgtccaattcgaaaacttccccaaaagcggtggaccctttagtgagttgcttcctttctcccctagtcaatagcgatgtggcgacgtcatagtggctaaccaaaccccttgtacgcagtgtatcacatccacgaggagccagctatcaatggcaactgtacgtcaaccctggcacatctggatccgtatcatcgtggcgagacacccgcctgtgattcttccaagcccgagtcttgccaggtcggcgatctgagtggaaaatacggcaaaatcacctcggatcccttcgtggccgagtactttgacctctacacctctctccagcccggcagcccagccttctttggcaatcgatcgattgtcgtccattacgcaaacaaaacacggctgacgtgcgccaattttgccaagctgccggtgtctaatactgccgcaaatgtccatactaccaccagtactcatcatacggccatccgtggccctgttgctactggttctcatcataacatcacccgcgctcacagcaccacaagtcgtcacaatatcacgggccctcattatactaccggtgctcacaccacaggcgtctctcctacgagtgctcttgctctgaccggcatcgtcactatcacttcgacaagcttcactaccgtccctgctggaagtagcgcaagtgctacgtcatccattgtacctttccca

SEQ ID NO: 150 - DNA, 719 bp, Aspergillus elegans
  gene (1)..(719)
atgcggtgcctttctcttgtctcgtccgccctgttgggcttcagcctggcagctaccgtctctgccggcccggtccccaagaatgcgcccgtcattgaggacaacgaccctgagttcatgtaccaggcaaagctgctcgacaaagacaactccaccgtcactgggcagttcactgcttgggctactgacgtcggagtcggcatcaagttccatgttgaagtcgagggcctccccgatggatctcttcattaccgtatgttactttcacctgcctgtccaattcatacccgcccttgctcgtatctaacacctttgcccatctagcctatcatatccacgaaaagcccgttcccaaggacggcaactgctacgcgaccggtgcccatcttgacccatacaagcgtggtgaccagcctccttgtgacatcaaagcgccgcagacttgccaggtcggcgatctgagcggcaaacacggtcctatcatcgcgcccgacgatgagacctacgaagtcttttacaccgactactacctctcgaaccagaaggacgaccctgcctacttcggcaatctttccatcgttgtgcacgcgcccgacaataccaggctgaactgtgcaaacttcgtgccgttgaacactctgaagagcgaggattccgagcaatccgagcaatccgaggactcggaggatcctaaggatcccgaggaacttgatgaatag

SEQ ID NO: 151 - protein, 745 aa, Thermoascus aurantiacus
  PEPTIDE (1)..(745)
MRAIGLLPGIIGIAGAACPYMTGELPRSFAENPHAINRRAEGGGGAAAETEKFLSQFYLNDNDTFMTTDVGGPIEDQNSLSAGDRGPTLLEDFILRQKIQRFDHERVPERAVHARGAGAHGVFTSYADWSNITAASFLSAAGKETPVFVRFSTVAGSRGSADTARDVHGFATRFYTDEGNFDIVGNNIPVFFIQDAIQFPDLIHAVKPSPNNEIPQAATAHDSAWDFFSQQPSSLHTLFWAMAGHGIPRSYRNMAGFGIHTFRFVTDDGASKLVKFHWTSLQGKASLVWEEAQAVAGKNADYHRQDLWDAIEAGRYPEWELGVQIMDEEDQLRFGFDLLDPTKIVPEEYVPITKLGKMQLNRNPLNYFAETEQIMFQPGHVVRGIDFTEDPLLQGRLFSYLDTQLNRHGGPNFEQIPINRPRTPIHNNNRDGAAQMYIPLNKAAYTPNTLNNGSPKQANQTVGKGFFTTPGRTASGRLVRAVSSTFADVWSQPRLFYNSLVPAEQQFLINAIRFETAHITSDVVKNNVIIQLNRVSNNLAKRVARAIGVAEPEPDPTLYHNNKTANVGVFGKPLARLDGLQVGVLATVNKPDSIKQAASLKASFAADNVDVKVVAERLADGVDETYSAADAVNFDAILVANGAEGLFARDSFTARPANSTTATLYPAGRPLQILVDGFRYGKPVGALGSGAKALDAAEISTTRAGVYVANSTTDSFINGVRDGLRTFKFLDRFAIDEDAETSHHH

SEQ ID NO: 152 - protein, 728 aa, Aspergillus lentulus
  PEPTIDE (1)..(728)
MRLTFIPGLIGVANAVCPYMTGELNRRDEVSDGDAAAATEQFLSQYYLSDNDTFMTSDVGGPIEDQNSLSAGERGPTLLEDFIFRQKIQRFDHERVPERAVHARGAGAHGVFTSYGDFSNITAASFLGKEGKQTPVFVRFSTVAGSRGSSDLARDVHGFATRFYTDEGNFDIVGNNIPVFFIQDAILFPDLIHAVKPRGDNEIPQAASAHDSAWDFFSQQPSTMHTLLWAMSGHGIPRSFRHVDGFGVHTFRFVTDDGASKLVKFHWKSLQGKASMVWEEAQQTSGKNPDFMRQDLYDAIEAGRYPEWELGVQIMDEEDQLRFGFDLLDPTKIVPEEFVPITKLGKMQLNRNPRNYFAETEQVMFQPGHIVRGVDFTEDPLLQGRLFSYLDTQLNRHGGPNFEQLPINQPRVPVHNNNRDGARQMFIPLNPHAYSPKTPVNGSPKQANQTVGDGFFTAPGRTTSGKLVRAVSPSFADVWSQPRLFYNSLVPAEKQFVIDAIRFENANVKSPVVKNNVIIQLNRIDNDLARRVARAIGVAEPEPDPTFYHNNKTANVGTFGTKLKKLDGLKVGVLGSVQHPGSVEGASTLRDRLKDDGVDVVVVAERLANGVDQTYSASDAIQFDAVVVAAGAESLFTTSSFTGGSANATTGASSLYPTGRPLQILVDGFRFGKTVGALGSGAAALRNAGIATSRDGVYVAPSVTDDFANGIKEGLSTFKFLDRFPVDH

SEQ ID NO: 153 - protein, 733 aa, Talaromyces stipitatus
  PEPTIDE (1)..(733)
MRGAYSLGAFASLIAVASAACPMLTGEIPAGSIANPHHLGSRADSNASDETEAFLSEFYLNDNNSFLTTDVGGPIEDQNSLKAGIRGSTLLEDFIFRQKIQRFDHERVPERAVHARGAGAHGVFTSYADWSNITAASFLGAAGKETPTFVRFSTVAGSRGSADTARDVHGFATRFYTDEGNYDIVGNNIPVFFIQDAIQFPDLIHAVKPQPASEIPQAATAHDTAYDFFGQQPSTLHTLFWAMAGHGIPRSFRHVDGFGVHAYRFVTDDGSSKLVKFHWKSLQGRASLVWEEAQATAGKNADFMRQDLFDNIAAGRYPEWELGVQLIEEPDQLSYGFDLLDPTKILPVEQVPITPLGKMQLNRNPLNYFAETEQVMFQPGHIVRGIDFTEDPLLQGRLFSYLDTQLNRNGGPNFEQIPINRPRVPIHNNNRDGFGQMFIPLNDAAYSPNTLSDGNPKQANETVGNGFFTTPGRTANGNLVRAKSPTFADVWSQPGLFYNSLTATEQQFVINALRFELANVASETVKNNFITQINRVNNTLATLVATAIGVNAPEPDPTYYHHNKTSDVGTFGTPLKKIDGLKVGVLASVNDENSISEGQSLARSLADLNVDVVIVAERLAGNVSATYSASDAINFDAVIVTSGAKGLFGPQTFTAVSNTTLYPVGRPTQILVDAFRYGKPVGAVGSASEALTVSDIDTDRSGVITGDLNDEFVKQLSEDLATFKFLDRFTVDE

SEQ ID NO: 154 - protein, 729 aa, Malbranchea cinnamomea
  PEPTIDE (1)..(729)
MPNLVRLLALAGVVSAACPYLSGELDKRQADSSNDAAQATEEFLQQFYLNDNDTYMTTDTGTPIADQQSLSVGERGPTLLEDFIFRQKIQRFDHERVPERAVHARGAGAHGVFTSYGDFSNITAASFLSAEGKQTPVFVRFSTVAGSRGSSDMARDVHGFATRFYTDEGNFDIVGNNIPVFFIQDAIQFPDLIHAVKPKQDNEIPQAATAHDSAWDFFSQQPSTMHTLMWAMAGHGIPRSYRHMDGFGVHTFRFVTDEGQSKLVKFHFKTLQGRASMVWEEAQVISGKNTDFHRQDLFEAIESGTYPEWEFGVQIVDEEDELKFGFDLLDPTKIIPEDLVPVTPLGKLQLNRNPRNYFAETEQVMFQPGHIVRGIDFTDDPLLQGRLFSYLDTQLNRHGGPNFEQLPINQPRVPIHNNNRDGAGQMYIPLNPHAYSPNTLHASSPRQANETHGKGFFTTPGRTPSGTLQRSLSPTFADVWSQPRLFYNSLHPVERQFLVNAIRFETSNLASSVVRKNVIIQLNRISNDLARRVARFIGVEEPQPDEKFYHNNKTVPLGTFGTPLKSLAGLKIGILSSVNSYEEASRIKSALLEKDSSVKVSVVAERLVPGEEGTVAYTAADGTSFDGIIVSNGTADGFTPYASSPLFPAGRPLQILVDAYRYGKPVGAIGDAGLKALDNAGIQEAERDAEKGVFTASDADATFVEDFLDGLKVFRFLERFDIDEDAEDY

SEQ ID NO: 155 - protein, 719 aa, Crassicarpon thermophilum
  PEPTIDE (1)..(719)
MRSEITTLLAWGGLLGLSQAACPFADPAAFQKRDDGQSADILENYKVDDSTGYLSSDVGGPISDQASLRAGGRGPTLLEDFIFRQKIQHFDHERVPERAVHARGAGAHGTFTSYADWSNLTAASFLSEAGKKTPVFVRFSTVAGSRGSADTARDVHGFATRFYTDEGNFDIVGNNIPVFFIQDAIQFPDLIHAVKPRPDNEIPQGATAHDSAWDFFSSQPSTMHTLFWAMAGHGIPRSYRHMDGFGVHTFRLVKEDGSSKLVKWHWKTRQGKASLVWEEAQALSGKNPDFHRQDLWDAIESGNGPEWELGVQVVDEDKALAFGFDLLDPTKIIPEELVPVTKLGVMKLDRNPTNYFAETEQIMFQPGHIVRGIDFSEDPLLQGRLFSYLDTQLNRNGGPNFEQLPINMPRAPIHNNNRDGAGQTFIHTNIYPYSPNTLNKGYPLQANQTNGRGFFTAPSRRVTGQLLRELSPTFTDHWSQPRLFYNSLKPVEQQFLINAIRFETSNLRSTTVKQNVLAQLNRVSHDVAVRVAAALGLEAPAADETYYHNNKTAGVSTFGEPLPTIKTLRVGVLATVQKSSNALAQAGQLKAALEQEGLVATVVAESLAEGVDQTYSAADATAFDAVVVVEGAEGLFASTIQATSSLFPAGRPGQILLDAYRWGKPVAVVGKAKGVYKSAGVPAGRDGVYIASAIDAVVEDLKDGLKTFRFTDRFALDDE

SEQ ID NO: 156 - protein, 741 aa, Penicillium emersonii
  PEPTIDE (1)..(741)
MRAVQLLPSLAGLIGAASAVGCPYLTGQLDARDVHNPHEFQRRQDPGDAAASTEQFLSQFYLNDSNSYMTTDVGGPISDQNSLKAGERGPTLLEDFIFRQKIQHFDHERVPERAVHARGAGAHGTFTSYGNWSNITAASFLSAEGKETPVFVRFSTVAGSRGSADTARDVHGFATRFYTDEGNFDIVGNNIPVFFIQDAILFPDLIHAVKPSPDNEIPQAATAHDTAWDFFSQQPSALHTLFWAMSGHGIPRSFRHMDGFGVHTFRFVTDDGASKLVKFHWTSLQGRASLVWEEAQAAAGKNLDYMRQDLYDNIEAGRYPEWELGIQIVDEEDQLKFGFDLLDPTKIIPVEYVPITPLGKLQLNRNPLNYFAETEQIMFQPGHIVRGIDFTEDPLLQGRLFSYLDTQLNRNGGPNFEQLPINRPRVPWHNNNRDGFSQAFIPLNKAAYSPNTLNNGNPKQANQTVGDGFFTTPGRTTSGRLMRTVSSTFSDVWSQPRLFYNSLVPAEQQFLVNAIRFENSNVKSEVVRNNVIIQLNRVDNDLARRVARVIGVAEPEPDPTYYHNNKTANVGTFGTPLKRIDGLKVGVLATVGDPDSISQGQSLSDALSDSKVDVTVVAESFTDGVDALYTNSDATGFDAVIVADGAEGLFTPSSFTAKPTNSFSTTTLYPAGRPLQILVDAFRFGKPVGALGSGAKALDAAGISTSRPGVYVANSTSEAFTDDIEDGLRTFKFLDRFALDE

SEQ ID NO: 157 - protein, 721 aa, Aspergillus versicolor
  PEPTIDE (1)..(721)
MRALGLVGLFGVAHAACPFIGGGGGLERRDTNPDATEATEEFLSEYYFDDNDVYLTSDVGGPIEDQQSLKAGERGSTLLEDFIFRQKIQRFDHERVPERAVHARGTGAHGVFTSYGDYSNITAASFLSSKGKETPVFVRFSTVAGSRGSSDLARDVHGFATRFYTDEGNFDLVGNNIPIFFIQDAIQFPDLIHSVKPSGNNEIPQAATAHDAAWDFFSQQPSTMHTLLWAMSGNGIPRSFRHVDGFGVHTFRFVTDHGSTKFVKFHWKTLQGKAGLVWEEAQQISGKNPDYMRQDLYEAIDAGRFPEWELAVQIMDEEDQLRFGFDLLDPTKIVPEEYVPLTKIGKMTLNRNPRNYFAETEQVMFQPGHIVRGVDFSEDPLLQGRLFSYLDTQLNRNGGPNFEQLPINQPRVPVHNNNRDGAGQMFIPLNPNAYSPNTLNKASPKQANQTVGRGFFTAPDRKANGNLVRVKSSTFEDVWSQPRLFYNSLVPAEKQFVVNAIRFENANVKSEVVKKNVIIQLNRISNDLATRVASAIGVDAPEPDQKYYHDNTTVGVGAFGHKLQKLAGLKVAVLASVDADQSFSAATALSAELSDNGVDVVVVAERLAEGVNQTYSASDAIQFDAVVLAPGTEKLFNSTTTASSTLYPAGRPLQILTDAFRWGKPVAALGSSSGALKSASIGQKDDGVYVAKSVNSDFASQLEQGLTVFRFLDRFALDSDK

SEQ ID NO: 158 - protein, 724 aa, Thermomucor indicae-seudaticae
  PEPTIDE (1)..(724)
MKAFRLSGIVVVFLAALQLDVLVFAEENMNHECAFQYGLPGSDAKDLQLERFTIIDAGTQETTNYGVRINNSESLKAGLRGPTLMEDFMMREKIMHFVHARGVGAHGYFESYADWSNITAAKFLSAPGKKTPVFVRFSTVLGFKGSPDTVRDDRGFATRFYTEDGNFDLVGNVIPPFFVQDAIKFPDLIHAAKPEPDTQVPQAGTAHDTAYDFFSSFPETLHTVLWVLSGRGIPRSFRQVEGFGIHTFRLINEEGKAVFVKFIWKPKQGLSNLIWDEAQKIAGKDIDFHRNDLYNAINRGDYPEYELCVQIVPEQDEFKFDFDLLDPTKLIPESIVPVTKLGKLVLNRNVENFFSETEQITLHPGHLVRGIGFTNDPLLQGRLFSYFDTQINRMNSVNFLQIPINRPIVPVHNNQRDGYMQQNIYAGKVAYYPNGLQGNTPALVDPDKGGYIEYPERVSGEKRRGRAPSFFDFYSQPQLFWNSLTEAEKQQLVDGARFEVGKCKSFDVRARFVDQLNHIDNGLARRVAAGVGVPLPEKMYENPGQSSVGISIEEYPKADNIRTRTVAILTAPGTNIEEARTMYGYLAQEGAYVEYIGLYLGDQDGLNITNTYLTTSSVLYDALYVPGGQEGIRKLMDKVSLFPFEEPKVFVMDAFRHGKPIAASSEGVELLMAAEVEIPNHNEDGVAYHEGVVIGNVSPPMEQKFKEALIQQRFWSRLPIDPPI

SEQ ID NO: 159 - protein, 728 aa, Aspergillus fumigatus
  PEPTIDE (1)..(728)
MRLTFIPSLIGVANAVCPYMTGELNRRDEISDGDAAAATEEFLSQYYLNDNDAFMTSDVGGPIEDQNSLSAGERGPTLLEDFIFRQKIQRFDHERVPERAVHARGAGAHGVFTSYGDFSNITAASFLAKEGKQTPVFVRFSTVAGSRGSSDLARDVHGFATRFYTDEGNFDIVGNNIPVFFIQDAILFPDLIHAVKPRGDNEIPQAATAHDSAWDFFSQQPSTMHTLLWAMSGHGIPRSFRHVDGFGVHTFRFVTDDGASKLVKFHWKSLQGKASMVWEEAQQTSGKNPDFMRQDLHDAIEAGRYPEWELGVQIMDEEDQLRFGFDLLDPTKIVPEEFVPITKLGKMQLNRNPRNYFAETEQVMFQPGHIVRGVDFTEDPLLQGRLFSYLDTQLNRHGGPNFEQLPINQPRVPVHNNNRDGAGQMFIPLNPHAYSPKTSVNGSPKQANQTVGDGFFTAPGRTTSGKLVRAVSSSFEDVWSQPRLFYNSLVPAEKQFVIDAIRFENANVKSPVVKNNVIIQLNRIDNDLARRVARAIGVAEPEPDPTFYHNNKTADVGTFGTKLKKLDGLKVGVLGSVQHPGSVEGASTLRDRLKDDGVDVVLVAERLADGVDQTYSTSDAIQFDAVVVAAGAESLFAASSFTGGSANSASGASSLYPTGRPLQILIDGFRFGKTVGALGSGTAALRNAGIATSRDGVYVAQSVTDDFANDLKEGLRTFKFLDRFPVDH

SEQ ID NO: 160 - protein, 717 aa, Thermothelomyces thermophilus
  PEPTIDE (1)..(717)
MQSKITTLLAWGGLLGLSQAACPFADPAALQRRDDAPPADILEKYKVDDSKGYMSSDVGGPIGDQASLRAGGRGPTLLEDFIFRQKIQHFDHERVPERAVHARGAGAHGTFTSYADWSNLTAASFLSSAGKKTPVFVRFSTVAGSRGSADTARDVHGFATRFYTDEGNFDIVGNNIPVFFIQDAIQFPDLIHSVKPRPDNEIPQAATAHDSAWDFFSSQPSTLHTLFWAMAGNGIPRSYRHMDGFGIHTFRLVKEDGSSKLVKWHWKTRQGKASLVWEEAQAVAGKNADFHRQDLWDAIESGNGPEWELGVQVVDEDKALAFGFDLLDPTKIIPEELVPITPLGVMKLDRNPTNYFAETEQIMFQPGHIVRGIDFSEDPLLQGRLFSYLDTQLNRNGGPNFEQLPINMPRAPIHNNNRDGAGQTFIHTNIYPYSPNTLNKGYPLQANQTSGRGFFTAPGRRVTGELLRELSPTFNDHWSQPRLFYNSLKPVEQQFLINAIRFETSHIRSTTVKQNVLAQLNRVSHDVAARVAAALGLEAPAPDDTYYHDNKTAGLSIFGEPLPTIKTLRVGVLASAQKDSSTLAQAGLLKAALEKDGLVVTVVGESLAEGVDQTYSAADATAFDAVIVAEGAERLFAAAGASSPLFPAGRPGQILLDAYRWGKPVGVIGKAEGAYKSAGVPVGGKGVYTAAGVDAIVKNLEEGLKTFRFTDRFPLDN

SEQ ID NO: 161 - protein, 738 aa, Curvularia verruculosa
  PRPTIDE (1)..(738)
MVRSNVLTAIAALCHAAHAVCPYMDGNSDALPASHPVARRDGASASSTDQFMGQFEIDDSKAYLTNPVGGPIPDQESLSAGERGPTLLEDQIFRRKIMHFDHERVPERAVHARGAGAHGVFQSFGDWSNITGASFLSAPNKETPTFIRFSTVAGSRGSADTARDVHGFAVRFYTDEGNFDIVGNNVPVFFIQDAIKFPDLIHAVKPKPDREIPQAATAHDSAWDFFSQQPSTMHTLMWAMSGHGTIRSYRHTDGFGVHTFRFVRDDGKSKLVKFRFRSLQGKAALLWEEAQTTAGMNADLHRQDLFESIENGYYPEWIFEAQIMEEEDQLRFGFDLLDPTKIVPEDIVPFTPLGKLTLNRNPRNYFAETEQVMFQPGHLVRGIDITDDPLLQGRMYSYLDTQLNRNGGPNFEQIPINQPRVPIHSNERDGAGQMYIPLNTAAYSPNTLNSGFPKQANQQEGRGFFTAPSRSVSGNLVRTVSSTFADAWSQPRLFFNSLSAVEQQFVINAIRFETSQLQSEVVKNNVLIQLNRISHDIATRVAEALGMDAPAADDKFYHNNKTINVNAGGEPLLKIEGLKVGYLTSASSSGENAKALKAALKDKKVGLTVVAEHLGAGIDQTYSAASAVNFDAIIVDGSASGLFAPAGSLANSNSTASTKARSTLYPAGRPLDILQTSYKFGKPVAVLGASNNTLSTAGIEANTPGVYSLDASDMSAVVNKISEGLQTFKFLDRYPLDN

SEQ ID NO: 162 - protein, 716 aa, Mycothermus thermophilus
  PEPTIDE (1)..(716)
MNRVTNLLAWAGAIGLAQATCPFADPAALYRRQDTTSGQSPLAAYEVDDSTGYLTSDVGGPIQDQTSLKAGIRGPTLLEDFMFRQKIQHFDHERVPERAVHARGAGAHGTFTSYADWSNITAASFLNATGKQTPVFVRFSTVAGSRGSADTARDVHGFATRFYTDEGNFDIVGNNIPVFFIQDAIQFPDLIHSVKPRPDNEIPQAATAHDSAWDFFSQQPSTMHTLFWAMSGHGIPRSYRHMDGFGVHTFRFVKDDGSSKLIKWHFKSRQGKASLVWEEAQVLSGKNADFHRQDLWDAIESGNGPEWDVCVQIVDESQAQAFGFDLLDPTKIIPEEYAPLTKLGLLKLDRNPTNYFAETEQVMFQPGHIVRGIDFTEDPLLQGRLFSYLDTQLNRNGGPNFEQLPINMPRVPIHNNNRDGAGQMFIHRNKYPYTPNTLNSGYPRQANQNAGRGFFTAPGRTVSGALVREVSPTFNDHWSQPRLFFNSLTPVEQQFLVNAMRFEISLVKSEEVRKNVLTQLNRVSHDVAGRVAAAIGLAAPDADDTYYHNNKTAGVSILGSGPLPTIKTLRVGILATTSESSALDQAAQLRTRLEKDGLVVTVVAETLREGVDQTYSTADATGFDGVVVVDGAAALFASTASSPLFPTGRPLQIFVDAYRWGKPVGVCGGKSSEVLDAADVPENGDGVYSEESVDKFVEEFEKGLATFRVSLGAFVF

SEQ ID NO: 163 - protein, 725 aa, Mycothermus thermophilus
  PEPTIDE (1)..(725)
MRALSLASLIGIASAACPYMTGELERRDTGTDDATAATEEFLSQYYMADNDTFLTSDVGGPIEDQNSLQVGDRGPTLLEDFIFRQKIQRFDHERVPERAVHARGVGAHGVFTSYGDYSNITAASFLGAEGKETPVFVRFSTVAGSRGSSDLARDVHGFATRFYTDEGNFDIVGNNIPVFFIQDAILFPDLIHAVKPRGDNEIPQAATAHDSAWDFFSQQPSSLHTLLWAMSGHGIPRSLRHVDGFGIHTFRFVTDNGDSKLVKFHWKSLQGKASMVWEEAQQVSGKNPDFMRQDLFEAIEAGRYPEWELGVQIMDEEDQLKFGFDLFDPTKIVPEEYVPITKLGKMTLNRNPRNYFAETEQVMFQPGHIVRGVDFTEDPLLQGRLFSYLDTQLNRHGGPNFEQLPINQPRVPVHNNNRDGAGQMFIPLNPNAYSPNTLNKGSPKQANQTVGKGFFTAPGRESTGRFTRAVSPSFEDVWSQPRLFYNSLTPAEQQFVVDAIRFENSNVKSSVVRNNVIIQLNRVSNDLARRVARAIGVEEPEADPTYYHNNKTTDVGTFGQKLKKLDGLKVGFLASVETPASIEAASELSKQLSEDGVDVVVVAERLSDGVDQTYSGSDAIQFDAVIVAPGAEGLFSTFSFTAPSNATSSSTLFPAGRPLQIVIDGFRFGKPVGAVGSAATALKNAGIQTSRDGVYVDKSVTSGFVDGIKDGLRTFKFLDRFKLDH

SEQ ID NO: 164 - protein, 730 aa, Penicillium oxalicum
  PEPTIDE (1)..(730)
MRAVGLVTGLIGIANAACPYMTGETAGLDRRGEKDAASGTEEFLSEFYLKDDENVFLTSDVGGPIEDQNSLKAGERGPTLLEDFIFRQKIQRFDHERVPERAVHARGAGAHGVFTSYGDWSNITAASFLSAEGKETPMFVRFSTVAGSRGSADTARDVHGFATRFYTDEGNFDIVGNNIPVFFIQDAIKFPDLIHAVKPRGDNEIPQAATAHDSAWDFFSQQPSSLHTLLWAMAGHGIPRSFRHVDGFGVHTYRLVTDKGDTKLVKFHWKGLQGKASLVWEEAQQVAGKNGDFMRQDLFDAIEAGRYPEWELGVQIMEEDDQLRFGFDLLDPTKIVPEELVPVVKLGKMTLNRNPMNYFAETEQVMFQPGHIVRGVDFTDDPLLQGRIYSYLDTQLNRHGGPNFEQIPINRPRVPIHNNNRDGAGQMYIPLNPNAYSPNTLNKGSPKQANETVGKGFFTAPGRTSSGKLLRAVSSTFEDVWSQPRLFWNSLVPAEQQFVVDAMRFENANVMSQVVRNNVVIQLNRISNDLAKRVAEAIGVDAPQPDPTYYHDNTTANIGAFGQKLKKLEGLKVGVLASVANASSISQGAALQSQLKDVGVDLVVVGERMAHGVNQTYSASDAINFDAVIVADGAEGLFSTSSSTVSPKAKSSGATSLYPAGRPMDILLDAFRFGKPVGSLGQGSVALENAQISSDRDGVYAAKSVDEDFGDKVKEGLRTFKFLDRFALDE

SEQ ID NO: 165 - protein, 717 aa, Humicola hyalothermophila
  PEPTIDE (1)..(717)
MHTGTTALLALGSFLGLSQAACPFADAAAFAKRDDSQSSDFFGRYKIDDSDGYMTSDVGGPIEEQFSLKAGIRGSTLLEDFIFRQKIQHFDHERVPERAVHARGAGAHGTFTSYADWSNLTAASFLNAAGKETPVFVRFSTVAGSRGSADTARDVHGFAVRFYTDEGNFDIVGNNIPVFFIQDAIRFPDLIHSVKPSPDSEIPQGATAHDSAWDFFSSQPSTMHTLFWAMAGYGIPRSYRHMDGFGVHTFRFVKDDGSSKLVKFHFKTLQGRASLVWEEAQVLAGKNADFHRQDLWDAIESGNGPEWEFAVQVVDEDKALAFGFDVLDPTKIIPEEFAPLTKLGKLKLNRNPTNYFAETEQVMFQPGHIVRGVDFSEDPLLQGRLFSYLDTQLNRHGGPNFEQIPINMPRVPIHNNNRDGAGQGFIHTNIYPYTPNTLNKGFPKQATREEGRGFFTAPGRTASGQLVRALSPTFDDHWSQPRLFYNSLTPVEQQFVINAMRFETSNVKSVEVRKNVIAQLNRVSHDVASRVAAALGLEAPAPEDQFYHNNVTAGISIFNGTLPTIRTLRVGVLASAGNRAVLGQAAELKERFAADGLVVTVVGEYLADGVDQTYSGADATGFDGVVVVDGAESLFDDKGSKSPLFPVGRPGQILLDAYRWGKPVAGLGKANQALRSVGVPTNNAPGVFVESGVEELVKAFEGGLQTFRFTDRFALDE

SEQ ID NO: 166 - protein, 739 aa, Thermoascus crustaceus
  PEPTIDE (1)..(739)
MRAIGLLPSIIGIAGAACPYMTGELPRSFAENPHDIHRRAEGGGAADETEKFLSRFYLNDNDTFMTSDVGGPIAEQNSLSAGERGPTLLEDFIFRQKIQHFDHERVPERAVHARGVGAHGVFTSYGNWSNITAASFLAAEGKETPVFVRFSTVAGSRGSADTARDVHGFATRFYTDEGNFDIVGNNIPVFFIQDAILFPDLIHAVKPSPENEIPQAATAHDSAWDFFSQQPSSLHTLFWAMAGHGIPRSFRTVDGFGIHTFRFVTDDGASKLVKFHWKSLQGKASLVWEEAQAVAGKNADYHRQDLYNAIEAGRYPEWELGVQIMDEEDQLRFGFDVMDPTKIVPEEYVPITKLGKMQLNRNPLNYFSETEQIMFQPGHIVRGIDFSEDPLLQGRLFSYLDTQLNRHGGPNFEQIPINRPRIPIHNNNRDGAAQMYIPLNKAAYSPNTLNNGSPKQANQTVGKGFFTTPGRTANGKLVRSVSSTFADVWTQPRLFYNSLVPAEQQFLINAIRFETAHLKSSVVKNNVIIQLNRVSNNLAKRVARAIGVEEPEPDPTFYHNNKTANVAVFGQPLARLDGLQVGVLASVDKADSIKQAASLKDSFAKDNVDVMVVAERLADGVDLTYSAADAVNFDAILVANGADDLFTRDSFTAKPSNSSSATLYPAGRPLQILVDGFRFGKPVGAFGSGAKALDAAEISTKRAGVYVADSTSDDFVKGVKDGLRTFKFLDRFAIDEDAE

SEQ ID NO: 167 - protein, 722 aa, Thielavia australiensis
  PEPTIDE (1)..(722)
MRSSIIALLAWGGLWGLSQAACPFANTGALNEKRDDSQSPDFLDKYKVDDSEGFMTSDVGGPIGDQFSLKAGIRGSTLLEDFIFRQKIQHFDHERVPERAVHARGAGAHGTFTSYADWSNLTAASFLNAAGKKTPVFVRFSTVAGSRGSADTVRDVHGFATRFYTDEGNFDIVGNNIPIFFIQDAIHFPDLIHAVKPRPDNEIPQAATAHDSAWDYFSSQPSTMHTLFWAMAGYGIPRSFRHMDGFGVNTYRFVKEDGSSTLIKWHLKTLQGKASLVWEEAQAVAGKNPDFHRQDLWDAIESGNHPSWELAVQVADEDKALAFGFDLLDPTKFIPEELAPLTRLGVMTLDRNPTNYFAETEQVMFQPGHVVRGVDFSEDPLLQGRLFSYLDTQLNRHRGPNFEQLPINMPRIPIHNNNRDGAGQGFIHKNVYHYSPNTLNNGFPLQANQTAGRGFFTAPGRVANGNLVRARSPTFDDHWSQPRLFYNSLTPVEQQLLINAIRFETSHLTSTTVKQNVLAQLNRVSNDVAARVAAALGLEAPAPDPTFYHDNVTAGLSIVNATLPTIKTLRVGVLASTASAGSLAQAAQLKERLAADGVVVSVVAETLGQGADQTYAAADATAFDGVVVADGAEGLFGDAAGPAAASSSLFPAGRPGQILVDAYRWGKPVGALGGAEKALESVGALSGSQPGVLTQSEVEEFVKGFEEGLAKFRFTDRFPLDS

SEQ ID NO: 168 - protein, 784 aa, Thielavia hyrcaniae
  PEPTIDE (1)..(784)
MAPSVRFALLGLLPLVSAGCPYADVHKRDGLSERADGFSIDTLSTSFGKCPSISDAAGGGTRSHDWWPCQLRLDVLRQFSPQQDPFGGNFDYAAAFATLDYKALKADLKALLTQSQPWWPADFGHYGGLFIRLAWHSAGTYRAIDGRGGGGMGQIRFAPLNSWPDNGNLDKARRLLWPIKQKYGKAISWADLFILAGNVALEEMGFPVLGFGAGRLDTWQSDESVYWGSETTWVPKGNDVRYNGSTDYAGRSSQLEKPLAAAHMGLIYVNPQGPDGNPDPKLSALDIRTTFGRMGMNDSETVALIAGGHAFGKAHGASNAAVGPAPEGAALEAQGFGWANPFGSGNAANTITSGLEVIWSKTPTKWSNNFLTSLFKNEWTLTKSPAGAHQFIALQGSQDYPEPFDNKTFRRPTMLVSDLALREDPTYGAIARAWVDDFPAFTRAFAAAWFKLTHRDMGPVARYLGPEVPKERFIWQDPLPAATSQPISDGEQEKLKADIFALPGITISSLVSVAWASASTFRGGDKRGGANGARIALQPQVSWEVNNPKQLQTVLGALNTLKETFNKSPGGKKQVSLADLIVLAGNAAIEHAAAAAGYKNTRVPFTPGRVDATQSDTDVASFEYLNPQADGFRNFRNFSGWARARTEELLVDKAQQLTLTPPEMTVLVGGMRALGANYDGSSTGVLTSRPGTLSNDFFANLLDVGTVWTAEAASGGEVFTGKDRATGQKKWTASRADLVFGSHAELRAIAEVYAEAGGQDKMVADFVAAWAKVMDLDRFDVKKK

SEQ ID NO: 169 - protein, 719 aa, Neurospora crassa
  PEPTIDE (1)..(719)
MRVNALLPLSGLIGTALAACPFADPSALGRRAEGGEVDARQRLKEVEVDDNGQFMTTDFGGNIEEQFSLKAGGRGSTLLEDFIFRQKLQHFDHERIPERVVHARGAGAHGIFTSYGDWSNITAASFLGAKDKQTPVFVRFSTVAGSRGSADTARDVHGFATRFYTDEGNFDIVGNNIPVFFIQDAIRFPDLIHSVKPSPDNEVPQAATAHDSAWDFFSSQPSALHTLFWAMSGNGIPRSYRHMDGFGIHTFRLVTEDGKSKLVKWHWKTKQGKAALVWEEAQVLAGKNADFHRQDLWDAIESGNAPSWELAVQLIDEDKAQAYGFDLLDPTKFLPEEFAPLQVLGEMTLNRNPMNYFAETEQISFQPGHIVRGVDFTEDPLLQGRLYSYLDTQLNRHRGPNFEQLPINRPVSGVHNNHRDGQGQAWIHKNIHHYSPSYLNKGYPAQANQTVGRGFFTTPGRTASGVLNRELSATFDDHYTQPRLFFNSLTPVEQQFVINAIRFEASHVTNEQVKKNVLEQLNKISNDVAKRVAVALGLEAPQPDPTYYHNNVTRGVSIFNESLPTIATLRVGVLSTTKGGSLDKAKALKEQLEKDGLKVTVIAEYLASGVDQTYSAADATAFDAVVVAEGAERVFSGKGAMSPLFPAGRPSQILTDGYRWGKPVAAVGSAKKALQSIGVEEKEAGVYAGAQDEVIKGVEEGLKVFKFLERFAVDGDDEE

SEQ ID NO: 170 - protein, 745 aa, Thermoascus aurantiacus
  PEPTIDE (1)..(745)
MRAIGLLPGIIGIAGAACPYMTGELPRSFAENPHAINRRAEGGGGAAAETEKFLSQFYLNDNDTFMTTDVGGPIEDQNSLSAGDRGPTLLEDFILRQKIQRFDHERVPERAVAARGAGAHGVFTSYADWSNITAASFLSAAGKETPVFVRFSTVAGSRGSADTARDVHGFATRFYTDEGNFDIVGANIPVFFIQDAIQFPDLIHAVKPSPNNEIPQAATAHDSAWDFFSQQPSSLHTLFWAMAGHGIPRSYRNMDGFGIHTFRFVTDDGASKLVKFHWTSLQGKASLVWEEAQAVAGKNADYHRQDLWDAIEAGRYPEWELGVQIMDEEDQLRFGFDLLDPTKIVPEEYVPITKLGKMQLNRNPLNYFAETEQIMFQPGHVVRGIDFTEDPLLQGRLFSYLDTQLNRHGGPNFEQIPINRPRTPIHNNNRDGAAQMYIPLNKAAYTPNTLNNGSPKQANQTVGKGFFTTPGRTASGRLVRAVSSTFADVWSQPRLFYNSLVPAEQQFLINAIRFETAHITSDVVKNNVIIQLNRVSNNLAKRVARAIGVAEPEPDPTLYHNNKTANVGVFGKPLARLDGLQVGVLATVNKPDSIKQAASLKASFAADNVDVKVVAERLADGVDETYSAADAVNFDAILVANGAEGLFARDSFTARPANSTTATLYPAGRPLQILVDGFRYGKPVGALGSGAKALDAAEISTTRAGVYVANSTTDSFINGVRDGLRTFKFLDRFAIDEDAETSHHH

SEQ ID NO: 171 - protein, 762 aa, Neurospora crassa
  PEPTIDE (1)..(762)
MKFFTTILSTASLVAALPAAVDSNHTPAAPELVARQKAKEALTSAPSSKKVDDLKNEFKETDKSARLTTDYGVKQTTADDWLRIVSDDKIGPSLLEDPFARERIMRFDHERIPERVVHARGSGAFGKFKVYESASDLTMAPVLTDTSRETPVFVRFSTVLGSRGSADTVRDVRGFAVKFYTEEGNWDLVGNNIPVFFIQDAIKFPDVIHAGKPEPHNEVPQAQSAHNNFWDFQFNHTEATHMFTWAMSDRAIPRSLRMMQGFGVNTYTLINAQGKRHFVKFHWTPELGVHSLVWDEALKLAGQDPDFHRKDLWEAIENGAYPKWKFGIQAIAEEDEHKFDFDILDATKIWPEDLVPVRYIGEMELNRNPDEFFPQTEQIAFCTSHVVNGIGFSDDPLLQGRNFSYFDTQISRLGVNFQELPINRPVCPVMNFNRDGAMRHTISRGTVNYYPNRFDACPPASLKEGGYLEYAQKVAGIKARARSAKFKEHFSQAQLFYNSMSPIEKQHMINAFGFELDHCEDPVVYGRMVQRLADIDLGLAQTIAEMVGGEAPTTTNHPNHGRKTINLSQTEFPPATPTIKSRRVAIIIADGYDNVAYDAAYAAISANQAIPLVIGPRRSKVTAANGSTVQPHHHLEGFRSTMVDAIFIPGGAKAAETLSKNGRALHWIREAFGHLKAIGATGEAVDLVAKAIALPQVTVSSEAEVHESYGVVTLKKVKPESFTDAVKIAKGAAGFLGEFFYAIAQHRNWDRELDGLHSMIAY

SEQ ID NO: 172 - protein, 745 aa, Thermoascus aurantiacus
  PEPTIDE (1)..(745)
MRAIGLLPGIIGIAGAACPYMTGELPRSFAENPHAINRRAEGGGGAAAETEKFLSQFYLNDNDTFMTTDVGGPIEDQNSLSAGDRGPTLLEDFILRQKIQRFDHERVPERAVAARGAGAHGVFTSYADWSNITAASFLSAAGKETPVFVRFSTVAGSRGSADTARDVHGFATRFYTDEGNFDIVGNNIPVFFIQDAIQFPDLIHAVKPSPNNEIPQAATAHDSAWDFFSQQPSSLHTLFWAMAGHGIPRSYRNMDGFGIHTFRFVTDDGASKLVKFHWTSLQGKASLVWEEAQAVAGKNADYHRQDLWDAIEAGRYPEWELGVQIMDEEDQLRFGFDLLDPTKIVPEEYVPITKLGKMQLNRNPLNYFAETEQIMFQPGHVVRGIDFTEDPLLQGRLFSYLDTQLNRHGGPNFEQIPINRPRTPIHNNNRDGAAQMYIPLNKAAYTPNTLNNGSPKQANQTVGKGFFTTPGRTASGRLVRAVSSTFADVWSQPRLFYNSLVPAEQQFLINAIRFETAHITSDVVKNNVIIQLNRVSNNLAKRVARAIGVAEPEPDPTLYHNNKTANVGVFGKPLARLDGLQVGVLATVNKPDSIKQAASLKASFAADNVDVKVVAERLADGVDETYSAADAVNFDAILVANGAEGLFARDSFTARPANSTTATLYPAGRPLQILVDGFRYGKPVGALGSGAKALDAAEISTTRAGVYVANSTTDSFINGVRDGLRTFKFLDRFAIDEDAETSHHH

SEQ ID NO: 173 - protein, 745 aa, Thermoascus aurantiacus
  PEPTIDE (1)..(745)
MRAIGLLPGIIGIAGAACPYMTGELPRSFAENPHAINRRAEGGGGAAAETEKFLSQFYLNDNDTFMTTDVGGPIEDQNSLSAGDRGPTLLEDFILRQKIQRFDHERVPERAVHARGAGAHGVFTSYADWSNITAASFLSAAGKETPVFVRFSTVAGSRGSADTARDVHGFATRFYTDEGNFDIVGANIPVFFIQDAIQFPDLIHAVKPSPNNEIPQAATAHDSAWDFFSQQPSSLHTLFWAMAGHGIPRSYRNMDGFGIHTFRFVTDDGASKLVKFHWTSLQGKASLVWEEAQAVAGKNADYHRQDLWDAIEAGRYPEWELGVQIMDEEDQLRFGFDLLDPTKIVPEEYVPITKLGKMQLNRNPLNYFAETEQIMFQPGHVVRGIDFTEDPLLQGRLFSYLDTQLNRHGGPNFEQIPINRPRTPIHNNNRDGAAQMYIPLNKAAYTPNTLNNGSPKQANQTVGKGFFTTPGRTASGRLVRAVSSTFADVWSQPRLFYNSLVPAEQQFLINAIRFETAHITSDVVKNNVIIQLNRVSNNLAKRVARAIGVAEPEPDPTLYHNNKTANVGVFGKPLARLDGLQVGVLATVNKPDSIKQAASLKASFAADNVDVKVVAERLADGVDETYSAADAVNFDAILVANGAEGLFARDSFTARPANSTTATLYPAGRPLQILVDGFRYGKPVGALGSGAKALDAAEISTTRAGVYVANSTTDSFINGVRDGLRTFKFLDRFAIDEDAETSHHH

SEQ ID NO: 174 - protein, 745 aa, Thermoascus aurantiacus
  PEPTIDE (1)..(745)
MRAIGLLPGIIGIAGAACPYMTGELPRSFAENPHAINRRAEGGGGAAAETEKFLSQFYLNDNDTFMTTDVGGPIEDQNSLSAGDRGPTLLEDFILRQKIQRFDHERVPERAVHARGAGAHGVFTSYADWSNITAASFLSAAGKETPVFVRFSTVAGSRGSADTARDVHGFATRFYTDEGNFDIVGNNIPVFFIQDAIQFPDLIHAVKPSPNNEIPQAATAHDSAWDFFSQQPSSLHTLFWAMAGHGIPRSYRNMDGFGIHTFRFVTDDGASKLVKFHWTSLQGKASLVWEEAQAVAGKNADYHRQDLWDAIEAGRYPEWELGVQIMDEEDQLRFGFDLLDPTKIVPEEYVPITKLGKMQLNRNPLNYFAETEQIMFQPGHVVRGIDFTEDPLLQGRLFSYLDTQLNRHGGPNFEQIPINRPRTPIHNNNRDGAAQMYIPLNKAAYTPNTLNNGSPKQANQTVGKGFFTTPGRTASGRLVRAVSSTFADVWSQPRLFYNSLVPAEQQFLINAIRFETAHITSDVVKNNVIIQLNRVSNNLAKRVARAIGVAEPEPDPTLYHNNKTANVGVFGKPLARLDGLQVGVLATVNKPDSIKQAASLKASFAADNVDVKVVAERLADGVDETYSAADAVNFDAILVANGAEGLFARDSFTARPANSTTATLYPAGRPLQILVDGFRYGKPVGALGSGAKALDAAEISTTRAGVYVANSTTDSFINGVRDGLRTFKFLDRFAIDEDAETSHHH

SEQ ID NO: 175 - DNA, 2236 bp, Thermoascus aurantiacus
  gene (1)..(2236)
atgcgagcaatcggcttgttgcctggcatcatcggtatcgcgggtgccgcatgtccctacatgacaggcgagctccctcggtcgttcgccgaaaaccctcacgccattaacaggcgagcggagggaggaggaggcgcagcagccgaaacagaaaagttcttgtcccagttctatttgaacgataacgacacgttcatgactacggatgtcggtggaccgattgaggaccagaactccctctcggcaggagatcgaggacccaccctcttggaagatttcatcctccgtcagaaaattcagcggttcgaccacgaaagggtgccggaacgcgcagtccacgcccgaggcgcaggtgcccatggcgtgttcacttcctacgcagactggtcgaacatcactgcagcgtcgttcctctccgcagcaggcaaggagacacccgtgttcgtcaggttctcgactgtggcaggctccaggggatcggcagacactgcacgcgatgtccatggtttcgccacaaggttctataccgatgagggtaacttcgatatcgtgggcaacaacattcccgtcttcttcatccaggacgccatccagttccccgacttgatccatgcggtgaagccgtcgcccaacaacgaaattcctcaggcagccacagcacacgattcggcatgggacttcttctcgcagcagccgtcgtcgttgcataccctcttctgggccatggcaggacacggaattcctcggtcctatcgaaacatggccggattcggcatccacaccttcaggttcgtcacagacgatggagcgtcgaagttggtgaagttccactggacctccctccagggcaaggcgtcgttggtctgggaagaagcacaggccgtcgcaggcaaaaacgccgattaccacaggcaggatttgtgggatgcgatcgaagcaggacgctatcctgaatgggaattgggtgtgcagatcatggacgaagaagaccagttgcggttcggattcgatttgttggaccctaccaagatcgtccccgaagaatacgtccccatcaccaaattgggcaagatgcagttgaaccgtaacccgttgaactatttcgcggaaactgaacagattatgttccagcctggccacgtggtgaggggcatcgatttcaccgaggaccctttgctccagggccggttgttctcgtacctcgacacccagctcaaccggcatggcggacccaacttcgagcagattcccatcaaccgacctcgcactccgatccataacaacaacagggatggtgcagcacagatgtacatccccttgaacaaggcagcgtacactcccaacacgctcaacaacggttcgcccaagcaggcgaaccagactgtgggcaagggcttcttcaccactcctggacgcactgcctccggcaggctcgtccgagcggtctcgtcgactttcgcggacgtctggtcgcagcccaggctcttctacaactcgctcgtgcctgccgaacagcagttcctcattaacgcaatccgattcgagacggcccacattacgtcggatgtggtcaagaacaacgtgatcatccagctcaaccgagtctccaacaacttggcgaaacgggtggcaagggcgatcggcgtggccgagcccgaacccgaccccaccttgtaccacaacaacaagacagcaaacgtgggcgtgttcggaaagccgttggccaggctcgacggattgcaggtcggcgtcctcgcaaccgtcaacaagccggactccatcaagcaggcagcctccctcaaggcctcgttcgcagcagataacgtcgacgtcaaagtcgtcgcggagaggctcgcagatggcgtggacgaaacctactccgcagccgatgccgtcaacttcgacgcgatcctcgtggcaaacggagccgagggattgttcgcacgggactcgttcacagcacgccctgcaaactcgaccactgccacactctaccctgcaggccgaccgctccagattttggtggacggattcaggtacggcaagcctgtgggtgcactcggatcgggagcaaaggccctcgatgcagccgaaatctcgactacaagggcaggcgtctatgtcgcgaactcgacaaccgattccttcatcaacggtgtcagggacggcctccgtactttcaaattcctcgatcgcttcgccatcgacgaagacgccgagactagtcatcaccatc

SEQ ID NO: 176 - DNA, 2502 bp, Aspergillus lentulus
  gene (1)..(2502)
atgcgtctcacgtttatccccggcctcattggcgtcgccaatgcggtatgtccttatatgaccggcgagctcaaccgtcgtgatgaggtatccgatggcgacgctgccgcagccacagagcaattcttgtcccagtattatctcagcgataatgataccttcatgacgtccgacgtaggcggccctatcgaagatcagaatagtctcagtgccggagagcgtggtcccaccctgctcgaagatttcattttccgtcaaaagatccagcgcttcgaccatgaacgggtacgataccgagactccttatcgctttcctgtgatgaacagaatgatctgaccgagtatgcaggtccccgagcgtgcggtccatgcccgtggtgccggcgcccatggagtcttcacttcatatggcgacttctcgaacatcactgcggcttctttcctgggtaaggaaggcaagcaaactcctgtatttgtccgcttctcgacggtcgcaggcagcaggggcagttcggatctggcccgcgatgttcacggttttgccactcgtttctataccgacgagggcaatttcggtacgttagtcaattcgcacaattgacatcgtcttgctaaccgttatagatattgttggaaacaatatccctgtattcttcattcaggatgctatcctcttccccgatctgatccatgccgtcaagcccagaggtgacaatgagatccctcaggctgccagtgctcatgactctgcctgggacttcttcagccagcagccaagcacgatgcacacgctgctctgggctatgtctgggcatggaattcctcgttctttccgacatgttgatggattcggtgtgcataccttccgattcgtgacagacgatggtgcatccaagctcgtcaaatttcactggaagtctttgcagggcaaggccagcatggtctgggaagaggcccagcagacctctggcaagaatcccgacttcatgcgtcaggatttgtacgacgcaattgaggctggccgctatcctgagtgggaggtaagttcgtcttccgccgtcctcctttcccagtggtctggtaaacatcagaaagagcaacaaggagctaatttcaaattcaatcagctcggcgttcaaatcatggatgaggaggaccaactgcggtttggttttgacctcttggaccccaccaagatcgtgccagaggaattcgtgcccatcaccaagttgggcaagatgcaactgaaccgcaaccctcgcaactacttcgctgagaccgaacaagttatggtatggtgccatcaggaagccgatacagaatgaatttgtaaactgactgccaatagttccaaccaggtcacattgtccgcggagttgacttcactgaagaccctctcctgcaagggcgtctgttttcgtacctggacactcagctgaaccgtcacggtggccccaactttgaacaactccccattaaccagcctcgcgttcccgtccacaacaacaaccgcgatggagcacgtgagacttttctaactttaacgtcagtgcttccgtcctaatcttttcattttctgcaggccaaatgttcatccccctcaaccctcacgcgtactcgcccaagactcccgtcaacggttcccccaaacaagccaaccagaccgtcggcgatggcttcttcacagctcctggccgtaccaccagcggcaaacttgtccgtgcggtcagcccaagctttgcggatgtctggtctcagccgcgtctcttctacaattctctggttcctgccgagaagcagttcgttattgacgccatccgcttcgagaacgcaaacgttaaatctcccgtcgtgaagaacaacgtcatcattcaattgaaccgcatcgataacgaccttgcacgacgcgtcgcgcgtgctattggtgtcgccgaacctgagcccgacccgaccttctatcacaacaacaagaccgccaatgtcggcacttttggaaccaagctgaagaagcttgatggcctcaaggtcggcgtcctgggttctgtccagcacccaggctcggttgagggagcttccaccctccgcgaccgcctgaaggacgacggtgtcgacgtggttgttgtcgcagagcgtctggccaacggtgtcgaccagacgtactctgcttcagatgcaatccaatttgacgctgtggttgttgccgctggcgcagagagtctcttcacgacatcctcgtttaccggtgggtcggccaacgcaactactggtgcaagctctctgtaccccaccggtcggcccctgcagattcttgttgacgggttccggttcggcaagactgttggggcgctgggaagcggcgcagctgctctccgcaacgcggggattgctacgtctcgggacggcgtgtatgtggctccgtcggtcactgatgactttgccaatggtattaaggaggggctcagcacttttaagttcttggaccggtttcccgtggatcactag

SEQ ID NO: 177 - DNA, 2421 bp, Talaromyces stipitatus
  gene (1)..(2421)
atgcgaggggcatactctctcggcgcctttgccagtctcatcgcggtagcttcggctgcctgcccaatgctgactggcgaaatcccagcaggcagcattgcaaaccctcatcaccttggaagccgcgctgactcgaatgcttccgacgaaacagaagcctttctgtccgaattctaccttaatgacaacaacagcttcctcactaccgatgtgggcggcccgatagaagaccaaaacagtctcaaggccggcattcgcggatcaacgctcttggaggatttcatctttcgccagaagattcagcgctttgatcacgagcgtgtaagttcttgaaatcatatgactacttcgatgtgtacttacgacttctaggtgcccgaacgcgctgtgcatgctcgaggtgctggtgctcatggtgtattcacatcgtatgctgattggtccaacatcaccgctgcttcattcctaggagctgccggaaaggaaacgcccacctttgtacgcttctcgactgttgccggcagtcgtggtagtgccgataccgctcgtgatgttcacggctttgctacccgcttctatactgacgaaggcaactacggtaagatctatccatggtcatagcagcctatacatttgctaactcacagcagatatcgttggaaacaacattcccgtcttcttcatccaagacgctattcagttccctgacctcattcatgcagtcaagccacagccagccagtgaaatcccacaggccgctactgcccacgacactgcttatgatttcttcggccagcagcctagtaccttgcataccctcttctgggcaatggcaggtcatggtatcccgcggtctttccgccatgttgacggattcggcgttcacgcttaccgatttgtgactgacgacggctcttcaaagctagtcaaattccactggaagtccttacagggtcgtgcaagcttagtctgggaagaagctcaagccactgctggcaagaatgctgatttcatgaggcaagatctgtttgacaatattgcagctggccggtacccagaatgggaggtgagtataagttgcctgtcctccgaagaatttcactaacatgaatagctcggcgtgcaacttatcgaggaaccagaccagctcagctacggatttgatctgcttgatcccaccaagatactcccagttgaacaagttccaatcaccccgctcggaaaaatgcaactcaaccgtaacccgctaaactactttgctgagaccgagcaagtaatggtacgttaacttctcttctccccctccccccaaacaactccgggtacagctcatgctgatcattttagttccaacctggtcacattgttcgtggcattgatttcacagaggaccctcttctccaaggccgtctattttcttacctcgacactcagcttaatcgcaacggtggccccaactttgagcagattccgatcaaccgtcctcgtgttcctatccacaataacaaccgagacggttttggccagatgtttattccactcaacgatgcggcatactcgccaaacaccctaagcgatggcaaccctaagcaggcaaatgagactgttggaaatggtttctttactactccaggacgcactgccaatggaaacctcgtccgcgccaaaagcccaacgtttgcggatgtgtggtcccaacctggcctcttttacaactccttgacagccaccgaacaacagtttgtcatcaatgctctgcggttcgagctagccaatgtagcaagtgagactgtgaagaataacttcatcacccagatcaatcgcgtaaacaacaccttggcaacacttgtagccactgcaattggtgtcaatgctcctgaacccgacccgacttactaccaccacaacaagacgtctgatgtgggaacattcggtactcctctgaagaagattgatggtctcaaggtcggagtccttgcttctgtcaacgatgaaaacagtatttccgagggacagtctctagcacgaagcttggcggatttgaatgtggacgtcgttattgtcgctgaacgacttgctggtaatgtctcagctacatactccgcatctgacgctatcaacttcgatgctgttattgtcacttcaggggctaagggtctctttggacctcaaaccttcaccgccgtatccaacaccactctttatcccgtgggccgtcccacgcagattttggtcgacgctttccgctacggcaagccggttggagcagtgggtagtgcaagcgaagcgctgactgtttcggacattgatactgaccgcagtggtgtgattactggtgatttgaacgacgagtttgtgaagcaactgtcggaggaccttgcaacattcaagttcttggaccgcttcaccgtcgacgagtag

SEQ ID NO: 178 - DNA, 2622 bp, Malbranchea cinnamomea
  gene (1)..(2622)
atgccgaacctcgtacggctccttgctcttgcgggagtcgtgtcggccgcttgtccctacctttcaggggaattggacaagcgtcaggctgactcgagcaacgatgcagctcaggctactgaggaatttctccagcagttctatctcaacgacaatgatacatatatgactactgacactggcacccccattgctgaccagcagagcttaagcgtgggtgagagaggcccaacgctccttgaggactttatcttccgccagaaaatacagcgatttgaccatgagcgtgtatgtgacaaaatcatgtgccttgccgcatactctctcgtccgtcacagatatggctaacgtgccgtcgaattgatacaggttcctgaacgtgctgtgcacgcacgcggagctggtatgatgccacattccttgtaacccaccgttcagaagttaatgctaaatggcactttttcgacaataggcgcccatggagttttcacatcgtacggagacttctcgaacatcactgctgcttcgttcctgtccgcggaaggcaaacagactcctgtatttgtccgtttttccacggttgctggaagccgtggtagctctgacatggctcgagacgtccatggttttgcaactcgattctatactgacgaaggcaactttggtaagtcctctctcttgggcgaggatggtcaatggtatagcacgtttgattgactttaattggtacccgcagatatcgtcggaaacaacatcccggtgttcttcatccaggacgctatccaattcccggaccttatccacgccgtgaagccaaagcaagataatgagatccctcaagcagccaccgcccacgattctgcttgggacttcttcagccagcagcccagcacgatgcataccttgatgtgggcaatggcaggacacggcatcccacgttcataccgacacatggacgggtttggtgtgcacaccttccgttttgtgactgacgagggacagtcgaagcttgtcaagttccacttcaagaccttgcaaggaagggcttctatggtttgggaagaggcacaagtcatctcggggaagaatacagattttcatagacaggacctctttgaggcaattgagtccgggacttatccagagtgggaggtatgcatctgcatttccatcctctcttagccttttcttgggtcccaggtgctgacctttgtgtacagttcggtgtccaaattgttgatgaggaagatgagttgaaatttggattcgacttgctcgacccaaccaagatcatccctgaggacttggttcccgtcacaccgttgggaaagctccagttgaaccggaaccctcgcaactactttgctgaaactgagcaggttatggtatgtcttgcatttcggtgaaatgcattctcgttggccgtaccgagagtctaacgaatttttgtttatagttccaacctggtcacattgtccgtggaatcgatttcacagatgatcctctgctccaaggccgactgttctcctaccttgacactcagctgaacaggcatggtggaccaaatttcgagcagctccctatcaaccagcctcgagtccctatccacaacaacaatcgtgatggtgccggtaggtttgatcaatccttgtggcgatccatttcccttgctgtcaatgtttctaactttgtttcgaaacaggtcaaatgtacattcctctgaacccccatgcgtatagtcccaatactctccacgctagttcccctcggcaagccaacgagacccacggcaaaggtttcttcactacccctggacgcactccatctggcactctgcaacgatctctcagccctacatttgcggatgtatggtctcagccacgtctcttctacaactcactacatcctgtggaacgccaattcctggtgaacgcgatcaggttcgagacgtcaaatctagccagctcggtcgtacgcaagaatgtgatcatccagctcaaccgaatttccaacgacctggcgagacgcgtggcacggtttatcggcgttgaggaacctcagcctgatgaaaagttctaccacaacaacaagacagtgccgcttggtactttcggaaccccgttgaagtcgcttgctggtctgaagattggtattctctccagtgtgaacagctacgaggaggcgtcgcgcatcaagagtgcgttgcttgaaaaggactcgagcgtcaaggtgtctgtcgtcgcggagagattggttcccggggaggagggcacagtggcctacaccgcagctgatggaacttctttcgacggtatcattgtgtcaaacggcacggcggatggtttcaccccgtatgcctcgtctccgctcttcccggctggccggccactgcagatcctcgttgacgcatatcgctacggcaagcctgttggtgctattggagatgctggactcaaggccctcgacaatgctggtatccaagaagctgagcgtgatgcggagaagggtgtgttcacagcgtctgacgccgatgcaaccttcgtcgaggactttctcgatggattgaaggtgttccgattccttgagcggtttgatattgacgaagatgcagaggactactag

SEQ ID NO: 179 - DNA, 2633 bp, Crassicarpon thermophilum
  gene (1)..(2633)
atgcggagcgagatcaccacccttctcgcttggggcggcttgctgggcctgtcccaggccgcatgcccctttgccgatccggccgcgttccagaagagagatgatggccagtcggccgacatcctcgagaactacaaggtagatgacagcaccggctacttgtcatctgatgtcggcggccccatctcggatcaggccagcctgagggccggcggtaggggtccaaccctgctcgaggacttcatcttccgccagaagatccagcactttgatcacgaacgggtgagtctcggaccctggtgttgtgtgttgctgccaatatagaaaaaaagaaaagaagagggaaaaaatcgggtggctgacgtgatatccgcttcaaggttcctgagcgtgctgtccacgcacggggtgccggagcccatggcactttcaccagctatgccgactggagcaacctcacggcggcctcgttcctgagcgaggccggcaagaagacgcccgtctttgtccgcttctctaccgtcgccggatccaggggcagcgccgataccgcgcgggacgttcacggtttcgcgacccggttgtaagttctcttctctcggccttttgctcatcgtctctgttttgtctcgggggagcgtttggcctgagctgacattgcccagttacaccgacgaaggcaactttggtatgcagacctgtgcaacccatgacgctcgttcgccgctaacccgggccagacattgtcggaaacaacattcccgtcttcttcatccaggatgctatccagttccctgacctcatccacgccgtcaagccgcggccggacaacgagatcccgcaaggagccaccgcccacgactcggcatgggactttttcagctcgcagcccagcacgatgcacacgctgttctgggccatggctggccacggcattccccgcagctaccgtcacatggtgagtctctctcccccccctcccttcttctcggccacagggcaactggctgacatgcggccaggatggcttcggcgtccacacgttccgcctcgtgaaggaggatggctcttccaagctggtcaagtggcactggaagacccgtcagggcaaggccagccttgtctgggaagaggcccaggcgctctctggcaagaaccccgatttccaccgtcaggatctctgggacgcgatcgagtccggcaacggacccgagtgggagctcggcgtccaggtggtggatgaggacaaggcgctggctttcggcttcgacctgctggacccgaccaagatcatcccggaggagctcgtgcccgtcacgaagctgggcgtcatgaagctggatcgcaacccgaccaactactttgccgagacggagcagatcatgttccagcccggccacattgtgcgcggcatcgacttctcggaggatcccctgctgcagggccgcctcttctcctacctcgacacgcagctgaaccgcaacggcggccccaactttgagcagttgcccatcaacatgccgcgggccccgatccacaacaacaaccgcgacggtgccgggcagacctttatccacaccaacatctatccttgtaagtctcgcgtctcttcctcgtagtttttgggtctcctcttttttacttcccgagagaagacatatcactaacacgcccccccccccccaaccccccgccagactctcccaacactctgaacaagggctaccccctgcaagccaaccagaccaacggccgcgggttcttcacggcgccgagccggcgtgtcacgggccagctgctccgggagctctcgccgacgttcaccgaccactggtcgcagccgcggctgttctacaactcgctcaagccggtggagcagcagttcttgatcaacgcgatccggttcgagaccagcaacctccggtcgacaacggtcaagcagaacgtgctggcgcagctcaaccgggtcagccacgacgtggcggtgcgggtggcggcggcgctgggcctggaggcgccggcggcggacgagacgtactaccacaacaacaagacggcgggcgtgtccacctttggcgagccgctgccgaccatcaagacgctgcgggtgggcgtgctggcgacggtgcagaagagcagcaacgcgctggcgcaggccggccagctcaaggcggcgctggagcaggagggcctcgtggcgacggtcgtggccgagtcgctggccgagggcgtcgaccagacctactcggccgccgacgcgaccgcctttgacgccgtcgtcgtcgtggagggcgccgagggcctcttcgcctccaccatccaggccacgtcctcgctcttccccgccggccgccccggccagatcctgctcgacgcctaccgctggggcaagcccgtcgccgtcgtcggcaaggcgaagggcgtctacaagagcgcgggcgtgccggccggccgcgacggcgtgtacatcgcctccgcgatcgacgccgtcgtcgaggatctcaaggacggtctgaagaccttcagggtatgttttgcgccctctttctttttttttcgtttcccttggtagagaaaaggatgtgctaacggatctacagtttacggaccggttcgcgcttgacgatgagtaa

SEQ ID NO: 180 - DNA, 2479 bp, Penicillium emersonii
  gene (1)..(2479)
atgcgcgcagtgcagcttctgcccagcctcgccggcctgattggcgctgcctctgccgttggatgtccgtatctgacgggccagctcgatgccagagacgtgcacaatccgcacgagttccagcgtcgacaggatcccggagatgcggctgcgtccacagagcagttcctgtcccagttctatctcaatgacagcaacagctacatgaccactgatgtcggcggccccatctcggatcagaacagtttgaaggccggagagcgcggtccaaccctgttggaggacttcatcttccgtcagaagatccagcactttgatcacgagcgggtaggttgtaccatccatgcgagagagatcgatcgatgttgacgtggtggcaggtcccagaacgcgcagtccatgctcgaggagccggcgcccacggaacgttcacttcctacggaaactggtccaacatcactgcggcctccttcctgagcgctgaagggaaggagacccccgtgtttgtgcgcttctccaccgtggccggaagtcgaggcagtgcggacacggcgcgcgatgtgcatggctttgccaccaggttctacactgacgagggcaactttggtacgtcgtctcacaatcctctcgactggcatcgtctgaccgctgagcagatatcgtcggcaacaacattccagtcttcttcatccaggacgccattctcttccctgatctgatccatgctgtcaagcccagccccgacaacgagatcccccaggctgcgactgctcatgacacggcctgggacttcttcagccagcagcccagtgcgttgcacacgctcttctgggctatgtccggccatggaatccctcgctcttttcgccacatggacggctttggcgtccacactttccgattcgtgactgacgacggcgcctccaagctggtcaaattccactggacctcgctgcagggccgggccagcctggtctgggaggaggcgcaagcggcagcgggaaagaacctggactatatgcgccaggacctctatgacaacatcgaagccggtcgatatcctgaatgggaggtaggtggccgcattttctcggcatatatatgtccatgctgacgttcctagctgggcattcaaatcgtcgacgaggaggatcagctcaagtttggatttgatctgctggatccaaccaagatcattcctgttgaatatgtccccatcacgccgcttgggaagctgcagctcaaccggaatccgctcaactatttcgccgagacggagcagataatggtatgtaaacagtttgttgttcgattctttgcagtagactgacgatacatagttccaacccggccatattgtgcgcggaattgactttaccgaagacccccttctccagggacggctcttctcctatctcgacacgcagttgaatcggaatggaggccccaatttcgagcagcttcccatcaatcgtcctagggtgccatggcataacaacaaccgtgatggattcagtaagtttacccccctgcgctgactctctgcatgctaactccaccaggccaagcgtttatccccctgaacaaggcggcctacagcccgaacacgctcaacaatggcaaccccaagcaggcgaaccagactgtgggcgatggattcttcaccactcccggacgtacgaccagtggccggctcatgcgcaccgtcagttcgaccttctccgacgtctggtcgcagcctcggctgttctacaactcgctggtgccggccgagcagcagttcctcgtcaacgccatccgtttcgagaactccaacgtcaagagcgaagtggtccggaacaatgtcatcatccagctcaaccgcgtcgataacgacctcgcccgccgggttgctcgggtcattggcgttgcagaacccgagcccgatccaacctattatcacaacaacaagacggccaacgtgggtacgtttggcacgccgctcaagcggatcgacggtctcaaagtcggtgtgcttgccacagttggcgacccagacagtatcagtcagggccagagcctcagtgacgcgctctcggactccaaggtcgatgtcactgtcgttgctgagtctttcacggacggggtcgatgcgctctacaccaactcggacgcgaccggcttcgacgccgttatcgtggctgatggcgccgaagggctttttaccccgagtagcttcacagccaaaccgacgaactcattctcgacgacaacgctttatccggccggtcgtccgctgcagatcctggtcgacgccttccggttcggcaagcccgtcggcgctctgggcagcggagctaaggcgcttgatgcggcaggtatctcgactagccggcctggtgtgtacgtcgccaactcgaccagcgaggcgttcacggacgatatcgaggatggtttgcgaacgttcaagttcctcgaccggtttgcgctggatgagtga

SEQ ID NO: 181 - DNA, 2309 bp, Aspergillus versicolor
  gene (1)..(2309)
atgcgcgccctcggtctcgtaggcctttttggcgtcgcccatgcagcctgtccgttcataggcggcggcggcggcctcgaacgtcgtgacacgaatcccgatgcgactgaggcgactgaggagttcctctccgagtactacttcgatgacaacgatgtttacctaacctccgatgtgggcgggcccattgaagaccagcaaagtctaaaggctggtgagcgggggtcgactttgttggaagattttatattccgccagaagattcagcggtttgaccatgagcgggtgcgtttggttcaattgagaaaaattggtttcagtcgctgatgtgtgtaggtccccgaacgcgcagtgcacgcccgcggtacaggtgcccatggtgtgtttacctcatacggcgactactccaacatcactgcagcttccttcctgtcaagcaagggcaaggagactccagttttcgttcgtttctctactgtcgcaggcagtcggggaagctccgaccttgctcgtgatgtccacggtttcgcgacacggttctacactgacgagggcaacttcgatctcgtcggcaacaacatccctattttcttcattcaggatgcgattcaattccccgatctgatccactcggtgaagcccagcgggaacaacgagattccacaggctgcgactgctcatgatgccgcctgggatttcttcagccagcagccgagtaccatgcacaccctcctgtgggcgatgtctggcaatggcatcccccgttcattccgccatgttgatggcttcggtgtacataccttccgctttgtcacggaccatggctccaccaagtttgtcaagttccactggaagacccttcagggtaaggccggtctagtatgggaggaggcgcaacagatctcgggcaagaaccccgactacatgcgccaggatctgtatgaggcaattgatgcagggcgattccctgaatgggaggtacgtattgttatgcagcattattggataaatggctgaccagatagcttgccgtgcaaatcatggacgaggaagatcaattgcgcttcggcttcgatcttcttgacccgaccaagatcgtccctgaagaatacgtccccttgaccaagattggcaagatgactctcaaccgcaaccctcgcaactactttgctgagaccgagcaggtcatggtatgtgaaacagtatcctcggtgattcctttctaatgtttgtagttccaacccggccacatcgttcgcggcgtcgacttcagcgaggatcctctcctccaagggcgtctcttctcgtacctcgacacgcagctcaaccgcaacggcgggcctaactttgagcagcttccgatcaaccagcctcgcgttcctgtccacaacaacaaccgtgatggcgccggccagatgtttatccctctcaatcccaatgcctacagccccaacactctgaacaaggcatcgcccaagcaagctaaccaaaccgttggacgtggcttcttcactgcacccgatcgcaaggccaatggaaaccttgtgcgcgtcaagagctctacttttgaggacgtctggtcccaacctcgtctcttctacaactcccttgttcctgcggagaagcagttcgtcgtcaatgcgatccggttcgagaacgccaacgtgaagagtgaagttgtgaagaagaacgtgatcatccagctgaaccgtatctcgaacgacctggccactcgggtcgcgagcgccattggcgtagatgctcccgagcccgaccagaagtactaccacgacaacacaaccgtcggtgtcggagctttcggtcacaaactccagaagctggccgggttgaaggttgctgtgcttgcctctgttgacgcggaccagtcgttcagcgctgccactgccttgtctgccgagctttcggataacggagtggacgttgttgttgtcgcagagcgcctcgctgagggtgtgaaccagacctactcggcgtcggatgccatccagttcgatgctgtcgtcctggccccaggcactgagaagcttttcaactcgacgacaaccgcaagctcgacactatacccggccggtcgtcccctccagatcctgacggatgcgttccggtggggcaagcccgttgctgcactgggtagcagttctggtgctctgaagagcgccagcattggccagaaggacgatggtgtatacgttgccaagagtgtcaattctgactttgcgagtcagctcgagcagggattgacggtgttccgcttcttggatcggtttgcccttgactcggataagtag

SEQ ID NO: 182 - DNA, 2647 bp, Thermomucor indicae-seudaticae
  gene (1)..(2647)
atgaaggcttttcggctttcgggcattgtcgttgtcttcctagctgcactccagcttgatgttctcgtttttgctgaagaaaacatgaaccacgaatgcgcctttcaatatggcttaccgggctcggatgccaaagatctccagctcgagcgctttacgatcattgatgccgggactcaggaaactaccaactatggtgttcgcatcaacaatagcgaaagtctgaaggctggtcttcgcggtccgactttgatggaggacttcatgatgcgcgagaagattatgcattttggtaagtcaataagcaagaattgcatggtatttaattgaatactgacgactcatactatcgtaatttctttttcaagatcacgagagaactcctgaacgtgtagttcatgcaagaggcgttggtgcccacggctactttgagtcctatgcagactggtctaatattacggccgccaagtttttgagcgctcccggcaagaaaacacctgtgtttgtacgcttctccaccgtacttggcttcaagggatcgccggatactgtgcgagacgaccgtggtttcgctactcgattttataccgaggacggaaactttgacttgggtaaggcaaagataacaatggtgtctgactgtagatcctttttgctaaatagctgcattgtcatttacagtcggaaacgtcattcctcccttcttcgtccaaggtaaaagaccaaacaagtagcttacatgacattgtaaataatgtcttcgtgtatttgcagatgcaatcaagttcccagatctgattcacgcagcaaagcctgaaccggacacccaagtgccgcaggcaggtactgcgcacgatactgcctatgatttcttttcctcgttccctgagaccctgcatactgtcctttgggtattgtccggacgcggtattccccgtagcttccgccaggtcgaaggttttggtatccatacgtaagtctttttctctcgacagcgtgcaagaaacaggaccaagatcaattaacgtctttgatatggctagtttccgtctcatcaacgaagaaggcaaggctgtctttgtcaagttcatttggaagccgaagcaaggtttatcaaacctgatttgggtaagaaacaaccgacgttctgacttgagcagcaaaaaaaaaaaaaaaaaaaaaaaaaaaaaaaaaaaaaaaaaagcggtctttaactggttatttcgtaggatgaagctcaaaaaattgctggcaaagacattgatttccaccgcaatgatctttacaatgccattaaccgcggagattatcctgaatatgaactttgcgtacaaatcgtgcctgaacaagacgaattcaagttcgattttgaccttttggaccctacaaaacttattcctgaatcaatcgtgcctgtcaccaaactgggcaagctggtgcttaatcgcaacgtcgaaaactttttctctgaaactgagcaaatcacgcttcacccgggccatctagtgagaggtacgagattatcaaggaaggttgttatttccgtatacatactgatcgtctcttttggcaaatatcaggtatcggatttaccaatgatccacttttgcaaggccgtttgttcagctactttgacacgcagatcaatcgtatgaacagcgtcaacttcctgcaaatccctatcaatcggcctattgttcctgtgcacaacaatcagcgcgacgggtacatgcagcagaatatttacgctggtaaagttgcgtactacccgaacggtcttcaaggcaacactcctgcgcttgtggatccagacaaaggcggatacattgaatacccagaacgagtcagcggtgaaaagcgccgtggacgcgctcctagcttctttgacttctactcacaaccccagctcttctggaactcgcttacagaagccgagaagcagcaactcgtggacggtgctcgattcgaagtcggcaagtgcaaatccttcgatgtccgtgctcgtttcgttgaccagctcaaccacattgacaacggcttggctcgccgtgtggctgctggtgttggcgttcctctgcctgagaagatgtacgagaaccccggtcagtcgtcagtaggcatctccatcgaggagtatcctaaggccgacaacatccgcacgcgtactgtcgccatccttactgctcccggtacgaacattgaagaagcccgaaccatgtacggttacctcgcccaagagggcgcctatgttgagtatattggcttgtaccttggcgaccaagacggtctcaacattaccaacacctatctcactacttcgtcggtcctctacgacgcactctatgtccccggtggtcaagaaggtatccggaagcttatggataaggtcagcttgttccctttcgaagaaccaaaggtctttgttatggatgcattccgtcacggcaagcctatcgcggcttcttctgaaggtgtggaactgctcatggctgctgaggtggaaatccccaaccacaacgaagacggcgttgcctaccacgaaggtgtcgttatcggcaacgtgagcccgcccatggaacaaaaattcaaagaagctcttattcaacagcgcttctggtcgcgtctccccattgatccacccatttaa

SEQ ID NO: 183 - DNA, 2502 bp, Aspergillus fumigatus
  gene (1)..(2502)
atgcgtctcacgttcatccccagcctcattggcgttgccaatgcggtatgtccctatatgaccggcgagctcaaccgtcgtgatgagatatccgatggcgacgctgccgcagccacagaggaattcttgtcccagtattatctcaacgacaatgatgccttcatgacgtccgacgtgggcggccctatcgaagatcagaatagtctcagtgccggagagcgtggtcccaccctgctcgaagatttcattttccgtcaaaagatacagcgtttcgaccatgaacgggtatgagaccaatattccttaaggctttttcctataatgtacaggattatctgaccgggttcgtaggtccccgagcgtgcggtccatgcccgtggtgccggcgcccatggagtcttcacttcatatggcgacttctcgaacatcactgcggcttctttcctggccaaggaaggcaagcaaacccctgtatttgtccgcttctcgacggtcgcaggaagcagaggcagttcggatctggcccgtgatgttcacggttttgccactcgtttctataccgacgagggcaatttcggtacgttggtcaaaccgcacaactgacatcgtcttgctaagtgtcatagatatcgttggaaacaatatccctgtattcttcatccaggatgctatcctcttccccgatctgatccacgccgtcaagcccagaggtgacaacgagatccctcaggctgcgactgctcatgactcggcctgggacttcttcagccagcagccaagcacgatgcacacactgctctgggctatgtctgggcatggcattcctcgttctttccgacatgttgatgggttcggtgtgcataccttccgattcgtgacagatgacggtgcatccaagctcgtcaaatttcactggaagtctttgcagggcaaggccagcatggtctgggaagaggcccagcagacctctggcaagaatcctgacttcatgcgtcaggatttgcacgatgcaatcgaggctggacgctatccggagtgggaagtaagtcgtcttccatcgtcatcacggccccctaatcttgtagacatcaagcaaccttcaagaagctaatgcctgattcaatcagctcggtgttcaaatcatggatgaggaggaccaactgcggttcggttttgacctcttggaccccacaaagatcgtgccagaggaattcgtgcccatcaccaagttgggcaagatgcaactgaaccgcaaccctcgcaactatttcgctgagaccgaacaagttatggtatggtgccatcaggaagctgatacagaatgaatctgtagtctgactgcaaacagttccaacctggtcacattgtccgtggtgttgacttcactgaagaccctctcctgcaaggccgtctgttttcgtacctggacactcagctgaaccgtcacggtggccccaactttgaacaactccccatcaaccaacctcgcgttcccgtgcacaacaacaaccgcgatggagcaggtgagacttttcaaacttttaaggccagtgcttccattaatcttttcatatttctgcaggccaaatgttcattcccctcaaccctcacgcgtactcgcccaagacctccgtcaacggttccccaaaacaagccaaccagaccgtcggcgatggcttcttcacagctcctggacgtaccaccagtggcaagcttgtccgtgcggtcagctcaagctttgaggatgtctggtctcagccacggctcttctacaattctttggttcctgccgagaagcagttcgttattgacgccatccgcttcgaaaatgcaaacgttaaatctcccgtggtaaagaacaacgtcatcattcagttgaaccgcatcgataacgaccttgcacgacgcgttgcgcgcgctattggtgtcgccgagcctgagcccgacccgaccttctatcacaacaacaagactgccgatgtcggcacttttggaaccaagctgaagaagcttgatggcctcaaggtcggcgtcctgggttctgtccagcacccgggctcggttgagggagcttccaccctccgcgaccgtctgaaggacgacggtgtcgacgtggttcttgtcgcagagcgtctggccgacggtgttgaccagacctattctacttcagatgcaatccaatttgacgctgtggtcgttgccgccggtgcagagagtctcttcgcggcatcctcgtttaccggtgggtccgccaactcagctagtggtgcaagctctctgtaccccaccggtcggcccctgcagattctcattgacggattccggttcggcaagactgttggggcgctgggaagcggcacagctgctctccgcaacgcggggattgcaacgtctcgggacggcgtgtatgtggctcagtcagtcactgatgactttgccaatgatcttaaggagggccttagaacttttaagtttttggaccggtttcccgtggatcactag

SEQ ID NO: 184 - DNA, 2664 bp, Thermothelomyces thermophilus
  gene (1)..(2664)
atgcagagcaagatcaccacccttctcgcctggggcggtctgttgggcctgtctcaggccgcatgcccctttgccgacccggccgcactccagaggagagatgatgctccgccggctgacattctcgaaaagtacaaggtggatgacagcaaaggctacatgtcatctgatgtcggcggtcccatcggggatcaggccagcctgagagccggcggcagaggtccaaccctgctcgaggacttcattttccgccagaagatccagcatttcgatcatgagcgggtgggtctagacctagtgttgtgtggtactggcgctccgtgccgtgcccaagtttgtctaagacatgcaacgagcaaaagatataactaacgcgatatccgtccgaaggttcccgaacgggctgtccacgcgcgcggtgccggagctcatggaactttcactagctatgccgactggagcaacctcacggcggcgtcgttcctgagctcggccggcaagaagacgccggtcttcgtccgcttctctaccgtcgccggatccaggggcagcgccgataccgcgcgagacgtccacggcttcgcgactcgattgtacgttttgttcggtttgcttatgtcttcgttttatgtcttcgttttgttttggggagttgaccttagctgacgttacccagttacaccgatgaaggcaactttggtatgttgcaactctgttgcccatgacgctcgttccttgctaaccatggccagacattgtcggaaacaacattcccgtcttcttcatccaggatgctatccagttccctgacctcatccactccgttaagccgcggccagacaacgagatccctcaagcggccaccgcccacgactcggcatgggacttcttcagctcgcagcccagcacgttgcacacgctgttctgggccatggctggcaacggcatcccccgcagctaccgtcacatggtgagtctctcccctccttcctggccttgcggcatacccaggccacggggcagctggctgacttccgccaggatggcttcggcatccacacgttccgcctcgtgaaggaagacggctcgtccaagctcgtcaagtggcactggaagactcgtcaggggaaggccagccttgtctgggaggaggctcaggcagtggccggaaagaacgcggacttccaccgtcaggatctctgggacgcgatcgagtctggcaacggccccgagtgggagctcggcgtccaggtggtggacgaggacaaggcgctggctttcggctttgacctgctggacccgaccaagatcatccccgaggagctcgttcccatcacgccgcttggcgtcatgaagctggatcgcaacccgaccaactactttgccgagacggagcagatcatgttccagcccggccacattgtgcgcggcatcgacttctccgaggatcctctgctgcagggccgcctcttctcctacctcgacacccagctgaaccgcaacggcggccccaactttgagcagctgcccatcaacatgccgcgtgcccccatccacaacaacaaccgcgacggcgctgggcagacctttattcacaccaacatctatccctgtaagtcatgccttcgctcctcatcttgctctcttcatgtttgtttccaaagaaaatcgctaaacgcttttcaaccccacctcccagactctcccaacactctgaacaagggctaccccctgcaagccaaccagaccagcggccgcgggttcttcacggcaccgggccggcgtgtcacgggcgagctcctccgcgagctctcgcccacgttcaacgaccactggtcgcagccgcgcctcttctacaactcgctcaagccggtggagcagcagttcctgatcaacgcgatccgattcgagacgagccacatccggtcgacgacggtcaagcagaacgtgctggcgcagctcaaccgggtcagccacgacgtggcggcgcgggtggcggcggcgctggggctggaggcgccggcgccggacgacacgtactaccacgacaacaagacggcgggcctgtccatctttggcgagccgttgccgaccatcaagacgctgcgggtgggcgtgctggcgagcgcgcagaaggacagcagcacgctggcgcaggccggcctgctcaaggcggcgctcgagaaggacgggctcgtggtgacggtcgtgggcgagtcgctggccgagggcgtcgaccagacctactcggccgccgacgcgaccgcgttcgacgcggtcatcgtggccgagggcgccgagcgtctgttcgccgccgccggggcctcgtccccgctcttcccggccgggcgccccggtcagatcctgctcgacgcctaccgctggggcaagcccgtcggcgtgatcggcaaggccgagggcgcgtacaagagcgcgggcgtgccggtcggcggcaagggcgtgtacaccgccgccggggtggacgcgatcgtcaagaatcttgaggagggtctgaagacgtttagggtatgttctgcaccattcgtccctcctttttcttcttggtgatccctctttcctctctctttccttacctggtatgtagagtccgagaatgcgctaacggatatgcagtttacggaccggttcccgcttgacaactaa

SEQ ID NO: 185 - DNA, 2509 bp, Curvularia verruculosa
  gene (1)..(2509)
atggtgcgatccaacgttttgacggcaattgccgccttgtgccatgcagctcacgctgtttgcccctacatggatggcaattctgatgccctaccagctagccacccagttgcccgccgcgatggtgcttctgcttcgtcgacagaccagtttatgggccagttcgagattgacgacagcaaagcgtaccttaccaaccctgtaggaggacccatccctgaccaagagtctctctcggccggtgagcgaggcccaacactactcgaggaccaaatcttccgtcggaagatcatgcactttggtgagcagaatctaaccgccgtcatttcggacacattgttaactggtacatgtagatcatgagcgtgtcccagaacgcgccgtgcatgctcgtggtgctggagctcacggggttttccaatcttttggagactggtccaacatcactggtgcctctttcctgagcgctccgaacaaggagacaccaaccttcattcgtttctctactgttgcgggaagtcggggctccgccgatactgcccgagatgttcatggctttgccgtcaggttttatactgacgaaggcaactttggtaagtgctctgactgacagtccagttgtctgtttgtggatcattattgctaaccagtgtctagatattgtcggcaacaatgttcccgtcttttttatccaagatgccatcaagtttccagacctgattcatgctgttaagcccaagccagacagggagattccccaggcagcgacagcccatgactccgcctgggacttcttcagtcaacagcctagcaccatgcacacactcatgtgggcaatgagcggacatggcactatccgttcctacaggcacacggatggtttcggtgtgcacaccttccgctttgttcgcgacgacggaaagtccaagctcgtcaagttcaggttccgctctctgcagggcaaggctgcgctcctatgggaggaggctcaaaccactgctggaatgaacgcagatctgcaccgacaggatctttttgaaagcatcgagaatggatactacccagaatggattgtacgtactcttggactcaccctgaacaacacaacaagcgctaacctgcctttagttcgaggctcaaatcatggaggaggaagaccagcttcgatttggattcgatctcctcgaccctaccaagattgtgcctgaagacattgttcctttcactccacttggaaagttgaccttgaaccgcaaccctcgcaactactttgccgagactgagcaagtcatggtatgttctcacgcgaccctctctacagctttaccggaaactgactcgagtgtttgttagttccaacctggtcatcttgtccgtggtattgacattaccgacgacccgctccttcaaggaagaatgtactcctatctggacactcagctaaaccgaaacggtggtccaaactttgagcagattcctatcaaccagcctcgtgtgcctatccattcgaacgagcgcgacggagccggtaagtttattgattgagttcacaaacaagttaagacagcaagcttacgcgtacataggccaaatgtatattcccctcaacacagctgcttatagtccaaacaccctcaacagcggatttcccaagcaggctaatcagcaggagggccgtggcttcttcacagcgccttcacgatccgttagcggaaacctagtgcgcactgtctcgagcacatttgcggacgcctggtcgcagcctcgtttgttcttcaactctctgtcagcagttgagcagcagtttgtcatcaacgccatccgctttgagacttcgcaattgcagagtgaggttgtcaagaacaatgtcctaattcagcttaaccgaatcagccacgacattgctacccgtgtggctgaagctcttggcatggatgcgcctgccgctgacgacaagttctaccacaacaacaagactatcaatgtcaacgcaggtggcgagccactgctcaagatcgagggtttgaaggtgggatacctgacatctgcatcgtcttctggtgagaatgccaaggcactcaaagccgcgctcaaggacaagaaggtcggtctcactgttgttgctgaacacctcggtgcgggcattgaccagacttactctgccgcttctgctgtcaactttgatgccatcattgtagacggcagcgcctcgggccttttcgcccctgcaggcagcctggcaaactccaactccacggcttccaccaaagcccgttccactctgtaccctgctggacgacctcttgacattctgcagactagctacaagtttggtaagcctgtagctgtgcttggagccagcaacaacactttgagcactgcgggtatcgaggccaacacgcctggtgtctactccctggatgcaagcgacatgtcggcagttgtcaacaagatctccgagggtctgcagacgttcaagttcctggacaggtacccattggacaactag

SEQ ID NO: 186 - DNA, 2709 bp, Mycothermus thermophilus
  gene (1)..(2709)
atgaacagagtcacgaatctcctcgcctgggccggcgcgatagggctcgcccaagcaacatgcccctttgcggaccctgccgctctgtataggcgtcaagatactaccagcggccagtcgccacttgcagcatacgaggtggatgacagcaccggatacctgacctccgatgttggcgggcccattcaggaccagaccagcctcaaggcaggcatccggggtccgacccttcttgaggactttatgttccgccagaagatccagcacttcgaccatgaacgggtaaggacataatgctcacacgagcggctgcgtacctatttatttccgagacattgggctggctggctggctgtgactgcctgagtttggggacatacggagtaccttactgacgcgctgatccactccaggttcccgaaagggcggtccatgctcgaggcgctggagcacacgggaccttcacgagttacgccgactggagtaacatcacagcggcgtcctttctgaacgccacaggaaagcagacgccggtgtttgtccggttctcgaccgttgctgggtctcgagggagcgcagacacggcgagagacgttcatggtttcgcgacgcggttgtaagttttgttgtgtttcattcgttccggtctgtagaggagggttaggatatgagctaatgtgtgtgtgtgtgtgtgtgtgtgtgtgaagttacactgatgaaggcaactttggtacgtcccatgcatggtcctcaattctcttatctggcagcgatgtggtcattgtcgacgttgctaacttgcgtagatatcgtcggaaacaacatcccggtattcttcattcaagatgcaatccagttccctgaccttatccactcggtcaagccgcgtcccgacaacgagattccccaagcggcgacggctcatgattcagcttgggacttcttcagccagcagccaagcaccatggtaagcaatggaccaaggagccgcacctggggtgacatgccagggagtacacggagcgttccgatgactctcgtgtgaccaaggcagtacaacactccacggaggactcgaagagattcggaaatatggaacacagaactgacaggatggtagcacacgttgttctgggccatgtctggccacggaatccctcgcagctatcgccatatggtacgtttgcctggctgagatgaccgtgaatccatttctaacctcaagtccaggatggcttcggcgtccacacgttccggtttgtcaaagatgacggctcgtccaagttgatcaagtggcatttcaagtcacgccagggaaaggcgagtctagtctgggaagaggcgcaggttctgtctggcaagaatgccgacttccaccgtcaggacctctgggatgctattgagtccgggaacggaccagaatgggatgtctgcgtccagattgtcgatgagtcccaggcgcaagcctttggcttcgacttgctggacccgacaaagatcatccccgaggagtacgcccccttgacgaagctgggcctcttgaaactggatcgcaatccgaccaactacttcgccgagacggagcaggtcatgttccaacccggtcatatcgtccgcggcatcgacttcacggaggatcccctgctacagggacgtctcttctcgtaccttgacacgcagctgaaccggaatggcgggcccaactttgagcagctgcccatcaacatgccgcgggtgccgattcacaacaataatcgcgacggcgccggccagatgttcatccacaggaacaagtatccttgtaagtacctcttttgcctcgatcgttgtggtgccggcttgctgacagacgcagacactcccaacaccctgaacagtggttatccgcggcaagccaaccaaaatgccggacgcggattcttcacagcgcctggccgtaccgtcagcggtgccctcgtccgtgaggtgtcgccaacattcaacgaccactggtcgcagccccgtctcttcttcaactccctcactcccgtcgaacagcagttcctcgtcaacgccatgcgcttcgaaatcagccttgtgaagtcggaagaagtcaggaagaacgtgctcacccagctcaaccgcgtcagccatgatgtggccgggcgcgtggccgccgctatcggcctcgccgcgcccgacgcggacgacacatactaccacaacaacaagacggctggcgtctcgatccttggaagcgggcccttgcctaccatcaagactctccgcgtcggcatcctggctaccacgagcgagtcgagcgcgctggatcaggcagcccagctccgcacccgtctggaaaaggacgggcttgtggtcacggttgtggctgaaacgctgcgcgagggggtagaccagacatactcgacggcggatgccacgggtttcgacggcgttgttgttgtggacggggcggcggcgctgtttgccagcaccgcgtcgtcgccgttgttcccgacgggcaggccgttgcagatctttgtggacgcgtatcggtggggaaagccggtcggtgtgtgtggtgggaagtcgagcgaggtgttggatgcggcggatgttccggaaaatggggacggggtgtattcggaggagtcggtggacaagtttgtggaggagtttgagaaggggttggctactttcagggtgagtcttggtgcctttgttttttga

SEQ ID NO: 187 - DNA, 2178 bp, Mycothermus thermophilus
  gene (1)..(2178)
atgcgcgccctctcccttgccagcctcattggcattgctagtgcggcgtgtccgtacatgaccggtgagcttgaacgtcgcgacacaggaaccgacgatgccaccgccgcgacagaggaattcttgtcccagtactatatggccgacaatgacacattcctgacctccgacgtgggcggccctattgaggatcagaacagccttcaagtcggagaccgcggcccgacattgctggaggatttcatcttccgacagaagatccagcgcttcgatcacgaacgtgttcctgaacgtgcagtccacgctcgcggtgttggtgcccatggtgtcttcacctcgtacggtgactactctaacatcactgctgcctcgttccttggagctgagggcaaggagactccggttttcgtgcgattctcgactgttgcgggtagccgtggtagttcggatttggctcgcgatgttcatggctttgcgactcgtttctacactgatgagggtaacttcgatattgttggcaacaacattcccgtcttcttcatccaggacgctattcttttccctgatctcatccacgctgtcaagcctcgtggtgacaatgagatccctcaggctgccactgcccatgactctgcttgggacttcttcagccagcagcccagttccctgcacaccctgctctgggccatgtccggccatggtatcccgcgctctcttcgccacgtcgatggctttggtatccacaccttccgcttcgtcactgacaacggtgactccaagctcgtcaagttccactggaagtccctgcagggtaaggccagcatggtctgggaagaagcgcagcaggtctctggcaagaaccccgacttcatgcgccaggatctcttcgaagcgatcgaggcgggcagataccctgagtgggagctcggtgttcaaatcatggatgaggaagaccagctgaagtttggcttcgatctgtttgatcccaccaagatcgtccccgaggaatacgtgccaatcaccaagctgggcaagatgactctcaaccgcaaccctcgcaactactttgccgagactgagcaggtcatgttccaacctggccacatcgtccgtggtgttgacttcaccgaggatcctcttctccagggccgtctcttttcgtacctcgacacccagttgaaccgtcacggcggacccaacttcgagcagctgcccatcaatcagcctcgcgtgcctgtgcacaacaacaaccgcgatggagccggccagatgttcatccccctgaaccccaacgcctactctccgaacaccctcaacaagggctctcctaagcaggccaaccagactgtgggcaagggcttcttcacggctcctggacgcgagtctactggccgtttcacccgtgccgtcagcccgtccttcgaggacgtctggtcgcagccgcgtctgttctacaactcacttactcccgccgaacagcagttcgtcgtcgatgctattcgttttgagaactccaacgtcaagagctcggtcgtacgcaacaatgtcatcatccagctgaaccgcgtgtccaacgacctcgcccgccgcgtcgctcgcgctatcggcgttgaggagcctgaggctgacccgacctactaccacaacaacaagaccactgacgttggcactttcggacagaagctgaagaagctcgatggactgaaggttggcttcctggcttcggttgagacccctgcctccatcgaggcagcctctgagctcagcaagcagctttctgaggacggcgttgatgttgtcgtcgttgcggagcgtctgtccgatggcgttgatcagacttactccggatcggatgccatccagttcgatgctgtgatcgtcgcgcccggcgctgagggtcttttctctactttctccttcactgcgcctagcaatgccacctcctcgtccactctgttcccggccggccggcccctgcagattgtcatcgatggattccgtttcggaaagcctgttggtgccgtcggcagcgccgctactgcgctcaagaacgccggtatccagacttctcgcgacggtgtgtacgtcgacaagtcggtgactagtggattcgtcgatggtatcaaggacggtcttcgcactttcaagttccttgaccgtttcaagctggaccattaa

SEQ ID NO: 188 - DNA, 2422 bp, Penicillium oxalicum
  gene (1)..(2422)
atgcgtgcagtcgggttggttacaggcctcattggcattgccaatgctgcctgtccctatatgacaggagaaacggctggcttggatcgccgtggtgagaaggacgccgcttcgggcaccgaggagttcctgtccgagttctacctgaaggatgacgagaatgtattcttgacgtccgacgttggcggtccaattgaggatcaaaacagcctgaaggcgggcgaacgcgggcccaccctgctcgaggatttcattttccgacaaaagatccagcgttttgatcatgagcgagtatgtttttcacgggattttcatttcgatgaacggaaagaatgtgcactgatggcacttcataggttccggagcgcgctgtccacgctcgaggagctggtgcccatggagttttcacctcttacggcgattggtcaaacatcactgcagcttctttcctgtctgcggaaggcaaggagacacccatgtttgtgcgtttctctactgttgccggaagccgaggcagcgccgacaccgctcgcgatgtacacggctttgcgacccgtttctacactgatgagggcaacttcggtaaggcgctcgattcactggatggccatcgatgcaagagactgactatttgcagacattgttggcaacaacattcccgtctttttcatccaggatgccatcaagttccccgatttgattcacgcagtcaagcctcggggtgacaacgagatcccacaggcagccactgcccacgactctgcctgggacttcttcagccagcagcccagctccctccacactctcctctgggccatggccggtcacggtatccctcgatctttccgccacgttgacgggtttggtgtgcacacttatcgccttgttacagacaagggagacaccaaattagtcaaattccattggaagggtctccagggtaaggccagtctggtctgggaagaggcacaacaagtggctggaaagaacggggacttcatgcgccaggatcttttcgacgccattgaagccggccgctacccggagtgggaggtatgtttgttgtcttccctcaaaccgagttacgggatactgacaacctttgcagctcggcgtccaaattatggaagaggatgaccaacttcgattcgggtttgatcttctggatccgaccaagatcgttcccgaggagcttgtccctgtcgtcaagcttggaaagatgacattgaaccgcaacccaatgaattactttgccgagactgagcaagtgatggtaggttgtgatccgagcaagcgtcaaataatcttgctgaccagtcgccaatagttccaacctggtcacattgttcgaggtgtcgatttcaccgacgaccctcttctccaaggtcgtatctactcttacctggacacgcagctcaaccgtcacggtggtcccaacttcgagcagattcccattaaccgtcctcgcgttcctatccacaacaataaccgcgatggtgctggtcaaatgtacattccgctcaaccccaatgcttattcccccaacactctcaacaagggctcccccaagcaggcgaacgagactgttggcaagggcttcttcacggcgcctggtcgcacctcaagcggcaagttgctccgtgctgtcagctccacctttgaggatgtctggtcccagccacgcctgttctggaactcgcttgtccctgccgagcagcagtttgtggttgacgcaatgcgctttgagaacgcaaatgtgatgagccaagtggtccgaaacaacgtcgtcatccagcttaaccgcattagcaatgacctggccaaacgcgtggctgaagcaattggcgtggatgcgccacagcctgatcccacctactatcatgacaacaccactgccaacatcggtgcctttggccaaaagctgaagaagctggagggccttaaggttggcgttcttgcctctgtggccaacgcttcatcaatttcccagggtgcagctctccagagccagctgaaggatgttggcgttgatttggtggtcgtcggtgagcgtatggcccacggtgttaaccagacttactccgcgagtgacgcgatcaacttcgatgcagtgattgttgccgacggtgctgagggactcttcagcacaagctcgagcactgtttcgcccaaggccaagtcatcgggcgccacctcgctgtaccctgccggtcgccccatggacatcctccttgacgctttccgcttcggtaagcctgttggatctcttggacagggctccgttgcgcttgagaacgcgcagatctcaagcgaccgtgacggtgtctacgctgcgaagagtgtcgatgaagactttggcgacaaggtcaaagagggcctgcggacttttaagttcttggaccgctttgctcttgatgagtag

SEQ ID NO: 189 - DNA, 2561 bp, Humicola hyalothermophila
  gene (1)..(2561)
atgcataccggcaccactgctctcctcgccttgggcagcttcctgggcctgtcccaggcggcctgcccttttgctgatgcggctgctttcgcaaagcgcgacgacagccagtcatccgacttcttcggcagatataagatcgatgacagcgacggatatatgacttctgatgtcggcgggcctatcgaggaacagttcagcttgaaggcaggaattaggggctcgacactgctcgaggatttcatcttccggcagaagattcagcacttcgaccatgagcgggtgagttcaagtacttccctcctgatttaatgcatgaaggcatcaaggagcagcggactgatatgatggtccccaacaaaaggttcccgagcgagcggtccatgctcgtggtgctggagcacacggcaccttcaccagctatgccgattggagcaacctcactgccgcgtctttcttgaacgcagcgggcaaggagactccggtcttcgtccgcttctctaccgtcgctggctcgaggggcagtgccgacactgcccgtgacgttcatggcttcgccgtccgattgtaagtcgtcgctatttcactccacggatggcctgaggctgacggtgcctagctacaccgacgagggtaactttggtacgcacattcggccgaaccccccggatcaccctatcacaaactaacttggttcagatattgtcggaaacaatattcctgttttcttcatccaggatgccatccggttccctgaccttatccactcggtcaagccgagcccggacagcgagatcccgcaaggagctactgcccacgactcggcctgggacttcttcagctcccagccgagcacgatgcacaccctcttctgggccatggctggctacggcatccctcgcagctaccgccatatggtcagtttcttgtatagtgagtgagaaacgtcttgctgacagatgccaggatggctttggcgtccatactttccggttcgtgaaggatgacggctcttccaagctcgtcaagttccacttcaagacactccagggcagggccagcttggtatgggaggaggcccaagtcctcgcgggcaagaacgccgacttccaccgccaggatctgtgggacgctattgagtcgggcaacggccccgagtgggagttcgccgtccaggtggtcgacgaggacaaggcgctggccttcggcttcgacgttctcgaccctaccaagatcattcccgaggagttcgcgcctctcaccaagctgggcaagttgaagctgaaccggaacccgaccaactactttgccgagacggagcaggtcatgttccagcctggtcacatcgtgcgcggcgtcgacttctccgaggatcctctgctgcaagggcggctcttctcgtacctcgacacgcagctgaaccgccacggcggccccaactttgagcagatccccatcaacatgccgcgggtcccgatccataacaacaaccgcgacggcgccggccagggcttcattcacacgaacatttatccctgtgcgtttcctctctttttttcctcgtttccctttattgccaactaactttggctcctctcccaaaaaatagacacccccaacaccctcaacaagggcttccccaagcaggccacccgcgaggaaggtcgcggcttcttcacggcccccggccgcaccgcctcgggtcagctcgtgcgggcgctctcgccgacctttgacgaccactggtcgcagccgcggctcttctacaattcgctcacgcccgtcgagcaacagttcgtgatcaacgcgatgcgcttcgagacgtccaacgtcaagtcggtcgaggtgcgcaagaacgtgatcgcccagctcaaccgtgtcagccacgacgtcgcttcccgcgtcgccgccgcgctcggcctcgaggcgcccgcgcccgaggaccagttctaccacaacaacgtcacggccggcatcagcatcttcaacggcacgctccccaccatccgcaccctccgcgtcggcgtcctcgccagcgcgggcaaccgcgccgtcctgggccaggccgccgagctcaaggagcggttcgccgcggacggcctcgtcgtcaccgtcgttggcgagtacttggccgacggcgtcgaccagacctactcgggggctgacgcgaccggttttgacggcgtcgtggttgtcgacggtgccgagagcctgttcgatgacaagggcagcaagtcgccgctgttccccgtcggcaggcccggccagatcctgctggatgcgtaccgctggggcaagccggttgccgggctcggcaaggccaaccaggcgttgaggagtgttggcgtgccgactaacaatgcgccgggcgtgtttgtcgagagtggggtcgaggagctggtcaaggcctttgaaggcgggttgcagacgtttagggtgagtttctcccccctcccctccctccttttttttctcctttcctccctagttgagaggctggcagtggcacagtattaactatggtcttacagttcaccgaccgttttgcccttgacgagtaa

SEQ ID NO: 190 - DNA, 2486 bp, Thermoascus crustaceus
  gene (1)..(2486)
atgcgcgcaattgggcttctgccgagcatcatcggcattgccggtgccgcctgcccttacatgacaggcgagcttccccgttcctttgcagagaaccctcatgacattcaccgtcgcgctgagggtggtggtgccgccgatgagacggagaagttcctgtctcggttctatctgaacgacaatgacaccttcatgacctccgatgttggaggcccaattgctgaacagaacagcctcagcgctggtgagagaggtcccaccctgctggaggacttcatcttccgccagaagatccagcacttcgaccacgagcgtgtaagctgatactactcagcccttcttgagaagagagtggtgctaaaacagtcctcaggtgccagaacgtgcggttcatgcccgaggagtaggagcgcacggtgtgtttacgtcctacggaaactggtccaacatcactgccgcttctttcctggccgctgagggcaaggaaactcctgtttttgtccgattctccactgttgcaggaagcagaggcagtgcggacacggcgcgtgatgttcacggtttcgcgaccaggttctacacggatgaaggaaactttggtaggcagcatatcctgcatccctcgaatatcttgatctgacagcccgcagacattgtcggaaacaacatccctgtcttcttcatccaggatgcaatcctcttccccgacctgatccatgccgttaagcccagcccggagaacgagatccctcaggccgcaaccgcccacgactctgcttgggacttcttcagtcagcagcccagctctctgcacaccttgttctgggctatggctggtcacggaattcctcgttccttcagaaccgtggatggcttcggtatccacactttccgcttcgtgacggacgacggagcttccaagcttgtcaagttccactggaagtcgctgcagggcaaggcttccctggtgtgggaagaggcccaggccgtggctggaaagaacgcggactaccaccgccaggacttgtacaacgcgatcgaggccggaagataccctgagtgggaggtaggctgtcctctctctgaatgttacgagtcatgttgctaaatgacctagcttggcgtgcaaatcatggacgaggaagaccagctgcggtttggctttgatgtgatggacccgaccaagatcgttcccgaggagtacgtgccaatcacgaagctgggaaagatgcagctcaaccgtaaccctctgaactacttctccgagaccgaacagatcatggttggtctgccgccatattcgattcaattgattctagatgttgacttgccatagttccaaccgggccacattgtccgtggtatcgacttttctgaagaccccttgctccagggccgtctcttctcttaccttgacacccagctcaaccgccacggaggccccaacttcgaacagatcccgatcaatcggccgcgcattcccatccacaacaacaaccgtgacggtgccggtaagctgaaccgtagtcttgtcctcctgcaacacattctaacagcagacagcgcaaatgtacatccccctgaacaaggcggcgtacagccccaacaccctgaacaacggctccccgaagcaggcaaaccagaccgtcggaaagggcttcttcaccactcctggtcgcactgcaaacggcaagcttgttcgctccgtcagctccaccttcgccgatgtctggacccagcctcgtctgttctacaactctctcgtcccggcggagcagcagttcctgatcaatgcgatccgcttcgaaacggcccacctcaagagctccgttgtaaagaacaacgtcatcatccagctcaaccgcgtgagcaacaaccttgccaagagagtcgccagggccatcggtgtcgaggagcctgagcccgacccaacattctaccacaacaacaagaccgccaacgtcgcggtgttcggccagccgctcgccagacttgacggcctccaggttggtgttctcgcctccgtcgacaaggccgactcgatcaagcaggccgccagcctgaaggacagcttcgccaaggataacgtcgacgtcatggtcgtcgcggagcgccttgctgacggcgtcgacctgacctactccgctgctgatgccgtcaacttcgacgccatcctggtcgccaacggcgctgatgacctcttcacccgcgacagcttcaccgccaagccgtccaactcgagcagcgccactctctaccccgctggtcggcctctccagatcttggtcgacggattccgcttcggaaagcccgttggcgcgtttggcagcggcgccaaggcgcttgacgcggcggagatctcgaccaagagggcgggtgtgtacgtcgcggactcgacgagcgatgactttgtcaagggcgtcaaggacggtctgcggaccttcaagttcctggaccggttcgctatcgatgaggatgcggagtaa

SEQ ID NO: 191 - DNA, 2518 bp, Thielavia australiensis
  gene (1)..(2518)
atgcgcagcagtatcatagccctgctcgcatggggcggcctatgggggttgtcccaggccgcctgccccttcgccaacacgggcgctctgaacgaaaagcgagacgatagccagtcgccagacttcctggacaagtacaaggtcgacgacagcgaaggcttcatgacatcagatgtcggcgggcccatcggggaccagttcagcctgaaggctggcatcaggggctcgacactgctcgaggactttattttccggcagaagattcagcatttcgatcatgagcgggtaagtgcaaagcactggtctctgtaggagacatagacatgccggtccacacgctgactggttgagaaggtccccgaaagggctgtccatgcgcgcggtgcaggagcccacggcacctttaccagctacgctgactggagcaacctcactgcggcgtctttcctgaacgccgctggcaagaagaccccggtctttgtccgcttctccacagtcgccggatccaggggtagcgcggacactgtcagagatgtccacggcttcgctaccagattgtgagttttcaacctacctggtaggagcctcaaactgacctttgcctagctataccgacgagggcaactttggtacgcagattatccacgaggtcggttctcactcaggtgtaaactgacccagtagatatcgttggcaacaacattcccatcttcttcatccaggatgccatccacttccccgacctcatccacgccgtcaagccgagaccggacaatgagattccccaagcagccaccgcccacgactctgcatgggactacttcagctcccagccgagcaccatgcacaccctcttctgggccatggccggctacggtatcccgcggagcttccgccacatggtgagttgcccagcgggacgtcctgtcgacaaaaattcgctgaccacacgtcaggatggcttcggcgtcaacacttataggttcgtaaaggaggatggatcttccacgctcatcaagtggcacctcaagaccctccaaggcaaggcgagcttggtctgggaggaggcgcaggccgtcgcaggcaagaaccccgacttccaccgccaggacctctgggacgccatcgagtcgggcaaccatccgtcgtgggagctcgccgtccaggttgccgacgaggacaaggcgctagccttcggtttcgacctgctagaccccaccaagttcatccccgaggagctcgctccgctcacgcggctgggtgtgatgaccctggatcggaacccgaccaactatttcgccgaaacggagcaggtcatgtttcagcccggccacgtcgtgcgcggcgtcgacttcagcgaggaccctttgctgcaggggcgtctgttctcgtacctcgacacgcagctgaaccgtcaccgcgggcccaactttgagcagctcccgatcaacatgccgcggatccccatccacaacaacaaccgtgacggcgccggccagggcttcatccacaagaacgtctatcactgtgagtaactccccttctttcggctttctaagcccgactaacgtatccaaccccctttagactcacccaacactctcaacaacggcttccccctccaagccaaccagaccgccggccgtggcttcttcaccgcccccggccgcgtagccaacggcaacctggtccgggcgcgctcgcctaccttcgacgaccactggtcccagccgcggctcttctacaactccctgacgcccgtcgagcagcagctcctcatcaacgccatccgcttcgaaacaagccacctcacctcgaccaccgtcaagcagaacgtcctggcccagctgaaccgcgtgagcaacgacgtcgccgcgcgcgtggccgccgccctggggttggaggctcccgccccggacccgaccttctaccacgacaacgtcacggccggcctgtccatcgtcaacgccaccctcccgaccatcaagacgctgcgcgtcggcgtgctcgccagcacggcgtccgccgggtcgctcgcgcaggcggcgcagctaaaggagcggctcgcggccgacggggtggtcgtctccgtcgtggcggagacgctgggccagggcgcggaccagacgtacgcggccgcggacgccacggcgtttgatggcgtcgtggtggcggatggagccgaggggctgtttggcgacgcggcggggccagctgctgcgtcctcgtcgctgtttcctgccggcaggccgggacagatcctggtcgatgcgtaccggtgggggaagccggtgggcgcgctcggaggggcggagaaggcgcttgagagcgtcggtgcgctgagtggtagccagccgggggttttgactcaaagcgaggtcgaggagtttgtgaagggttttgaggaggggctggcgaagttcagggtgagttccgtttggccctgcttttgtcgagaactggacagcgctaacggcgaaatttgcagtttaccgatcggttccctcttgacagctga

SEQ ID NO: 192 - DNA, 2705 bp, Thielavia hyrcaniae
  gene (1)..(2705)
atggcaccctcagtccgtttcgccctccttgggctcctccctctcgtctcggctggttgtccgtatgccgacgttcacaagcgcgacggcctttccgagagagcagacggcttctccatcgacacgctctccacgtcgttcggcaagtgcccgagcatcagcgacgcagctggcggcggcacccggagccacgactggtggccctgccagctgaggcttgacgtgcttcgtcagttctcgcctcagcaggatccctttggtggcaactttgactacgccgccgcctttgctacgctcgattgtaagttgaattccatccgtgagacccattaacattgagactgatgagattgcttgcagacaaggcgctcaaggcggacctgaaagccctgttgactcagtcccagccttggtggccggctgactttggccactatggcggcctgttcatccgtttggcctggcacagcgctggcacttaccgcgccatcgatggacgtggcggcggaggcatggtacgggttccccctttccatcatccacatcctaacagctgacccccgttacccctgaaaagggccaaatccgcttcgcccccctgaacagctggcccgacaacggcaacctggacaaagcacgccgcctgttgtggcccatcaagcaaaagtacggcaaggccatttcgtgggccgatctctttatcctcgccggcaacgtggcccttgaggagatgggcttccccgtgctcggcttcggcgccggccgcctcgacacctggcagtcggacgagagcgtctactggggctccgagacgacctgggtgcccaagggcaacgacgtgcgctacaacggcagcaccgactacgccggacgctccagccagcttgagaagccccttgctgctgcccacatgggtctcatctatgtcaacccccagggtccggatggcaaccctgatcctaagctgtctgcgttggatatccgcaccacctttggtcgtatgggcatgaatgactcggagactgtcgccttgattgctggtggacacgcctttggcaaggctcacggtgcctcgaatgccggtgagtgacactctcttgtgcccctgagagcaggagacatgctgacatcgatatgcagctgttggtcccgcccctgagggcgctgctctcgaggctcagggcttcggctgggccaaccccttcggcagcggcaatgccgccaacaccatcacgagcggtctggaagtaatctggtccaagacgccgaccaagtggagcaacagtaagtctgaccaagacatgctggacatgacacgccttactcaccgctctcagacttcttgacaagtctgttcaagaacgaatggaccctgaccaagagccccgccggcgcccaccagttcatcgccctccaaggctctcaggactaccccgagcccttcgacaacaagacgttccgccgccctaccatgctggttagcgaccttgccctgcgcgaggatcccacctacggtgccattgcccgcgcctgggttgatgacttccctgccttcactcgcgcttttgccgccgcctggtgtaagtccttgccccctttcctgtcttcttgaagatacagtcttgcttacacgacgacagtcaagctcacccaccgtgacatgggccccgtcgcgcgctacctcggccctgaggttcccaaggagcgcttcatctggcaagaccccttgcctgccgccacgtcccagcccatcagcgacggcgagcaggaaaagctgaaggcggatatttttgctctccccggcatcaccatctcgagcctggtttccgtcgcctgggcctctgcctcgacctttcgcggcggtgataagcgcggcggcgccaacggagcccgcatcgccctgcaaccccaggtctcgtgggaggtcaacaaccccaagcagctgcagactgtcctgggcgccgtacgctcccgtacatcctcatctttacaaccttcaagatctaactaacccctgccagttaaacaccctcaaagaaaccttcaacaaatcccccggcggcaaaaaacaagtctccctcgccgacctgatcgtcctcgccggcaacgccgccatcgagcacgccgccgccgccgccggctacaaaaacacccgcgtgcccttcaccccgggccgcgtcgatgccacccagtccgacaccgacgtcgcctcgttcgagtacctcaacccgcaggccgacggcttccgcaacttccgcaacttctccggctgggcgcgtgcccgcaccgaggagctgctcgtcgacaaggcgcagcagttgactctcaccccgcctgagatgactgtcctcgtgggcgggatgagggcgctgggtgcgaactatgacggctcctcgacgggggtgttgacgtcccgcccggggacgttgagcaatgatttctttgcgaatttgttggatgttgggactgtgtggacggcggaggctgcgagtggtggggaggtgtttactgggaaggatagggcgacgggtcagaagaagtggacggcgagcagggcggatttggtgtttgggtcgcatgcggagctgagggcgattgcggaggtgtatgcggaagcgggcgggcaggataagatggtggcggactttgtggcggcgtgggcgaaggttatggatttggatcggtttgatgtgaagaagaaatag

SEQ ID NO: 193 - DNA, 2288 bp, Neurospora crassa
  gene (1)..(2288)
atgcgtgtcaacgctcttctaccgttgagcggccttattggcactgctctagcggcatgcccctttgccgacccttctgctcttggtcgccgtgccgagggcggtgaggttgacgcccgtcagaggttgaaggaggttgaggttgacgacaacggccaattcatgacaacagatttcggcggcaacattgaggaacagttcagtctgaaggctggtggccggggctcgacattgcttgaggacttcatcttccgtcagaagctccagcacttcgaccatgagcgcgtatgtcttccctgccatggcccaattagcatcaagaatcctagctaacgaaagtttgataccagattcccgagagagtcgttcatgcccgtggtgccggtgcccacggtatcttcaccagttatggcgactggtccaacatcaccgccgcctccttcctgggcgccaaggacaagcaaacaccggtcttcgtccgcttctctaccgttgccggttccaggggttccgccgacactgcccgtgatgttcacggcttcgccacgagattgtatgttgaccacgtaacaacccttcccttcacctcttcagcagggcgttaacttgactccagctataccgacgagggcaactttgatatcgtcggcaacaacattcccgtctttttcatccaggatgccatccgcttccccgaccttattcactccgtcaagcctagccccgacaatgaggttccccaagccgccaccgcccacgactccgcttgggacttcttcagctcccagccctccgctctccacaccctcttctgggccatgtctggcaacggtattccccgcagctaccgtcatatggatggtttcggtatccataccttccgtctggtgaccgaggacggcaagtccaagctcgtcaagtggcattggaagacgaaacagggaaaggccgctctcgtctgggaggaggctcaagtcctcgccggcaagaacgccgacttccaccgtcaggatctctgggacgctatcgagtccggaaacgccccttcatgggagctcgccgttcagcttattgacgaggacaaggcccaggcttacggcttcgaccttcttgatcccaccaagttccttcccgaggagttcgcccctctccaggttctcggtgagatgaccctcaaccgcaaccctatgaactacttcgccgagaccgagcagatctccttccagcccggccacattgttcgcggcgtcgacttcaccgaggatcccctgctgcagggtcgtctctacagctacctcgacacccagctcaaccgccacaggggccccaactttgagcagctccccatcaaccgccctgtctctggcgtccacaacaaccaccgcgacggtcaaggccaggcttggatccacaagaacatccaccactacagcccgtcttacctcaacaagggctaccctgcccaggccaaccagaccgtcggccgcggcttcttcactacccccggccgcaccgcgtctggcgtcctgaaccgcgagctcagcgccacctttgacgaccactacacccagccccggctcttcttcaactcgctcacccccgtcgagcagcagttcgtcatcaacgcgatccgcttcgaggccagccacgtcaccaacgagcaggtcaagaagaacgttctcgagcagcttaacaagatctccaacgacgtggccaagcgcgtggccgttgcgctcggcctcgaggcgccccagcccgacccgacctactaccacaacaatgtcacccgcggcgtttccatcttcaacgagagcctccccaccatcgccaccctccgcgtcggcgtcctctccaccaccaagggcggctccctcgacaaggccaaggccctcaaggagcagctcgagaaggacggcctcaaggtcaccgtcatcgccgagtaccttgccagcggtgtcgaccagacctactccgctgccgacgccaccgccttcgatgccgttgtcgtggccgagggcgctgagcgcgtcttcagcggcaagggcgccatgagccctcttttccctgctggccgtcctagccagattcttactgatggttaccgctggggtaagcccgttgctgccgtcggcagcgccaagaaggcgctccagagcatcggggtagaggagaaggaggccggtgtttatgccggtgctcaggacgaggttatcaagggcgtcgaggagggcctcaaggtgttcaagttccttgagcgtttcgccgttgatggcgatgatgaggagtaa

SEQ ID NO: 194 - DNA, 2236 bp, Thermoascus aurantiacus
  gene (1)..(2236)
atgcgagcaatcggcttgttgcctggcatcatcggtatcgcgggtgccgcatgtccctacatgacaggcgagctccctcggtcgttcgccgaaaaccctcacgccattaacaggcgagcggagggaggaggaggcgcagcagccgaaacagaaaagttcttgtcccagttctatttgaacgataacgacacgttcatgactacggatgtcggtggaccgattgaggaccagaactccctctcggcaggagatcgaggacccaccctcttggaagatttcatcctccgtcagaaaattcagcggttcgaccacgaaagggtgccggaacgcgcagtcgccgcccgaggcgcaggtgcccatggcgtgttcacttcctacgcagactggtcgaacatcactgcagcgtcgttcctctccgcagcaggcaaggagacacccgtgttcgtcaggttctcgactgtggcaggctccaggggatcggcagacactgcacgcgatgtccatggtttcgccacaaggttctataccgatgagggtaacttcgatatcgtgggcgccaacattcccgtcttcttcatccaggacgccatccagttccccgacttgatccatgcggtgaagccgtcgcccaacaacgaaattcctcaggcagccacagcacacgattcggcatgggacttcttctcgcagcagccgtcgtcgttgcataccctcttctgggccatggcaggacacggaattcctcggtcctatcgaaacatggacggattcggcatccacaccttcaggttcgtcacagacgatggagcgtcgaagttggtgaagttccactggacctccctccagggcaaggcgtcgttggtctgggaagaagcacaggccgtcgcaggcaaaaacgccgattaccacaggcaggatttgtgggatgcgatcgaagcaggacgctatcctgaatgggaattgggtgtgcagatcatggacgaagaagaccagttgcggttcggattcgatttgttggaccctaccaagatcgtccccgaagaatacgtccccatcaccaaattgggcaagatgcagttgaaccgtaacccgttgaactatttcgcggaaactgaacagattatgttccagcctggccacgtggtgaggggcatcgatttcaccgaggaccctttgctccagggccggttgttctcgtacctcgacacccagctcaaccggcatggcggacccaacttcgagcagattcccatcaaccgacctcgcactccgatccataacaacaacagggatggtgcagcacagatgtacatccccttgaacaaggcagcgtacactcccaacacgctcaacaacggttcgcccaagcaggcgaaccagactgtgggcaagggcttcttcaccactcctggacgcactgcctccggcaggctcgtccgagcggtctcgtcgactttcgcggacgtctggtcgcagcccaggctcttctacaactcgctcgtgcctgccgaacagcagttcctcattaacgcaatccgattcgagacggcccacattacgtcggatgtggtcaagaacaacgtgatcatccagctcaaccgagtctccaacaacttggcgaaacgggtggcaagggcgatcggcgtggccgagcccgaacccgaccccaccttgtaccacaacaacaagacagcaaacgtgggcgtgttcggaaagccgttggccaggctcgacggattgcaggtcggcgtcctcgcaaccgtcaacaagccggactccatcaagcaggcagcctccctcaaggcctcgttcgcagcagataacgtcgacgtcaaagtcgtcgcggagaggctcgcagatggcgtggacgaaacctactccgcagccgatgccgtcaacttcgacgcgatcctcgtggcaaacggagccgagggattgttcgcacgggactcgttcacagcacgccctgcaaactcgaccactgccacactctaccctgcaggccgaccgctccagattttggtggacggattcaggtacggcaagcctgtgggtgcactcggatcgggagcaaaggccctcgatgcagccgaaatctcgactacaagggcaggcgtctatgtcgcgaactcgacaaccgattccttcatcaacggtgtcagggacggcctccgtactttcaaattcctcgatcgcttcgccatcgacgaagacgccgagactagtcatcaccatc

SEQ ID NO: 195 - DNA, 2350 bp, Neurospora crassa
  gene (1)..(2350)
atgaagttcttcaccaccatcctcagcaccgccagccttgttgctgctctccccgccgctgttgactcgaaccataccccggccgctcctgaacttgttgcccggcaaaaggccaaggaggccctcaccagtgcccccagcagcaagaaggtggacgatctcaagaacgagttcaaggagaccgataagagtgcccgcctcaccaccgactatggtgtcaagcagaccacggccgacgactggctgaggatcgtcagcgacgacaagattggtccttcgttgctcgaggacccctttgcccgtgaaagggtacgtatcccatcctactaacacttttctgcccgtatcgcggctaacaacattctttcagatcatgcgcttcgaccacgagagaatcccagagcgagtagtccacgcccgtggcagcggtgcctttggcaagttcaaggtctacgagagcgcctccgacctcacaatggcccctgtccttaccgatacttcgcgcgagactcccgtctttgtgcgcttctctaccgttctcggcagtcgaggcagtgccgacacggtccgtgatgtccgtggtttcgccgtcaagttctacacagaggagggcaactgggatctggtcggcaacaatatccccgtcttcttcatccaggatgccatcaagttccccgatgtcatccacgctggcaagcccgagccccacaacgaggtgccccaggcccagagcgcccacaacaacttttgggatttccagttcaaccacaccgaggccactcacatgttcacctgggccatgagtgatcgcgccattccccgttccctccgcatgatgcagggtttcggtgtcaacacctacactctcatcaacgcccagggcaagcgtcactttgtcaagttccactggactcccgagctcggtgtccactccctcgtttgggatgaggccttgaagctggctggtcaggatcccgatttccaccgcaaggatctttgggaggctatcgagaacggtgcctaccccaagtggaagtttggtatccaggctattgccgaggaggacgagcacaagttcgactttgacatcctcgatgccaccaagatctggcccgaggacctcgttcccgtccgttacattggtgagatggagcttaaccgcaacccggacgagttcttcccccagaccgagcagatcgccttctgcaccagccacgtcgtcaacggtattggcttctcggacgaccctcttctccagggccgtaacttttcctactttgacacccagatctcccgtcttggtgtcaacttccaggagctgcccatcaaccgccctgtgtgccctgtcatgaactttaaccgtgatggtgccatgcgccacaccatctcccgcggcaccgtcaactactaccccaaccgtttcgacgcctgccctcccgcctccctcaaggaaggcggttacctcgagtacgcccagaaggtcgccggtatcaaggcccgcgcccgcagcgccaagtttaaggagcacttcagccaggcccagctcttctacaactcgatgtcgccaattgagaagcagcacatgatcaacgcttttggcttcgagctcgaccactgcgaggatcctgttgtctacggccgcatggttcagcgtctggccgacatcgatcttggtcttgctcagaccattgccgaaatggttggcggcgaggctcccactaccaccaaccaccctaaccacggcaggaagaccatcaacctcagccagaccgagttcccgcctgcgaccccaaccatcaagtcccgccgtgttgccatcatcatcgccgatggctacgataacgtcgcttatgacgctgcctatgccgctatttctgccaaccaggccatccctcttgttatcggcccccgccgttccaaggtcactgctgccaatggctcgaccgtccagccccaccaccacctcgagggcttccgttcgaccatggtggacgccatcttcatccccggcggcgccaaggctgctgagacgctctccaagaacggccgtgctctgcactggatccgtgaggcgtttggtcatctcaaggccattggtgctaccggcgaggcggttgacctcgttgccaaggcgattgctctgcctcaggtcacagtcagcagcgaggcggaggttcatgaaagctatggtgttgtgacgctcaagaaggttaagcctgagagcttcacagatgccgtcaagattgccaagggcgctgctgggttcttgggagagttcttctatgccattgcccagcacaggaattgggacagagagttggatggcttgcactccatgattgcgtactaa

SEQ ID NO: 196 - DNA, 2236 bp, Thermoascus aurantiacus
  gene (1)..(2236)
atgcgagcaatcggcttgttgcctggcatcatcggtatcgcgggtgccgcatgtccctacatgacaggcgagctccctcggtcgttcgccgaaaaccctcacgccattaacaggcgagcggagggaggaggaggcgcagcagccgaaacagaaaagttcttgtcccagttctatttgaacgataacgacacgttcatgactacggatgtcggtggaccgattgaggaccagaactccctctcggcaggagatcgaggacccaccctcttggaagatttcatcctccgtcagaaaattcagcggttcgaccacgaaagggtgccggaacgcgcagtcgccgcccgaggcgcaggtgcccatggcgtgttcacttcctacgcagactggtcgaacatcactgcagcgtcgttcctctccgcagcaggcaaggagacacccgtgttcgtcaggttctcgactgtggcaggctccaggggatcggcagacactgcacgcgatgtccatggtttcgccacaaggttctataccgatgagggtaacttcgatatcgtgggcaacaacattcccgtcttcttcatccaggacgccatccagttccccgacttgatccatgcggtgaagccgtcgcccaacaacgaaattcctcaggcagccacagcacacgattcggcatgggacttcttctcgcagcagccgtcgtcgttgcataccctcttctgggccatggcaggacacggaattcctcggtcctatcgaaacatggacggattcggcatccacaccttcaggttcgtcacagacgatggagcgtcgaagttggtgaagttccactggacctccctccagggcaaggcgtcgttggtctgggaagaagcacaggccgtcgcaggcaaaaacgccgattaccacaggcaggatttgtgggatgcgatcgaagcaggacgctatcctgaatgggaattgggtgtgcagatcatggacgaagaagaccagttgcggttcggattcgatttgttggaccctaccaagatcgtccccgaagaatacgtccccatcaccaaattgggcaagatgcagttgaaccgtaacccgttgaactatttcgcggaaactgaacagattatgttccagcctggccacgtggtgaggggcatcgatttcaccgaggaccctttgctccagggccggttgttctcgtacctcgacacccagctcaaccggcatggcggacccaacttcgagcagattcccatcaaccgacctcgcactccgatccataacaacaacagggatggtgcagcacagatgtacatccccttgaacaaggcagcgtacactcccaacacgctcaacaacggttcgcccaagcaggcgaaccagactgtgggcaagggcttcttcaccactcctggacgcactgcctccggcaggctcgtccgagcggtctcgtcgactttcgcggacgtctggtcgcagcccaggctcttctacaactcgctcgtgcctgccgaacagcagttcctcattaacgcaatccgattcgagacggcccacattacgtcggatgtggtcaagaacaacgtgatcatccagctcaaccgagtctccaacaacttggcgaaacgggtggcaagggcgatcggcgtggccgagcccgaacccgaccccaccttgtaccacaacaacaagacagcaaacgtgggcgtgttcggaaagccgttggccaggctcgacggattgcaggtcggcgtcctcgcaaccgtcaacaagccggactccatcaagcaggcagcctccctcaaggcctcgttcgcagcagataacgtcgacgtcaaagtcgtcgcggagaggctcgcagatggcgtggacgaaacctactccgcagccgatgccgtcaacttcgacgcgatcctcgtggcaaacggagccgagggattgttcgcacgggactcgttcacagcacgccctgcaaactcgaccactgccacactctaccctgcaggccgaccgctccagattttggtggacggattcaggtacggcaagcctgtgggtgcactcggatcgggagcaaaggccctcgatgcagccgaaatctcgactacaagggcaggcgtctatgtcgcgaactcgacaaccgattccttcatcaacggtgtcagggacggcctccgtactttcaaattcctcgatcgcttcgccatcgacgaagacgccgagactagtcatcaccatc

SEQ ID NO: 197 - DNA, 2236 bp, Thermoascus aurantiacus
  gene (1)..(2236)
atgcgagcaatcggcttgttgcctggcatcatcggtatcgcgggtgccgcatgtccctacatgacaggcgagctccctcggtcgttcgccgaaaaccctcacgccattaacaggcgagcggagggaggaggaggcgcagcagccgaaacagaaaagttcttgtcccagttctatttgaacgataacgacacgttcatgactacggatgtcggtggaccgattgaggaccagaactccctctcggcaggagatcgaggacccaccctcttggaagatttcatcctccgtcagaaaattcagcggttcgaccacgaaagggtgccggaacgcgcagtccacgcccgaggcgcaggtgcccatggcgtgttcacttcctacgcagactggtcgaacatcactgcagcgtcgttcctctccgcagcaggcaaggagacacccgtgttcgtcaggttctcgactgtggcaggctccaggggatcggcagacactgcacgcgatgtccatggtttcgccacaaggttctataccgatgagggtaacttcgatatcgtgggcgccaacattcccgtcttcttcatccaggacgccatccagttccccgacttgatccatgcggtgaagccgtcgcccaacaacgaaattcctcaggcagccacagcacacgattcggcatgggacttcttctcgcagcagccgtcgtcgttgcataccctcttctgggccatggcaggacacggaattcctcggtcctatcgaaacatggacggattcggcatccacaccttcaggttcgtcacagacgatggagcgtcgaagttggtgaagttccactggacctccctccagggcaaggcgtcgttggtctgggaagaagcacaggccgtcgcaggcaaaaacgccgattaccacaggcaggatttgtgggatgcgatcgaagcaggacgctatcctgaatgggaattgggtgtgcagatcatggacgaagaagaccagttgcggttcggattcgatttgttggaccctaccaagatcgtccccgaagaatacgtccccatcaccaaattgggcaagatgcagttgaaccgtaacccgttgaactatttcgcggaaactgaacagattatgttccagcctggccacgtggtgaggggcatcgatttcaccgaggaccctttgctccagggccggttgttctcgtacctcgacacccagctcaaccggcatggcggacccaacttcgagcagattcccatcaaccgacctcgcactccgatccataacaacaacagggatggtgcagcacagatgtacatccccttgaacaaggcagcgtacactcccaacacgctcaacaacggttcgcccaagcaggcgaaccagactgtgggcaagggcttcttcaccactcctggacgcactgcctccggcaggctcgtccgagcggtctcgtcgactttcgcggacgtctggtcgcagcccaggctcttctacaactcgctcgtgcctgccgaacagcagttcctcattaacgcaatccgattcgagacggcccacattacgtcggatgtggtcaagaacaacgtgatcatccagctcaaccgagtctccaacaacttggcgaaacgggtggcaagggcgatcggcgtggccgagcccgaacccgaccccaccttgtaccacaacaacaagacagcaaacgtgggcgtgttcggaaagccgttggccaggctcgacggattgcaggtcggcgtcctcgcaaccgtcaacaagccggactccatcaagcaggcagcctccctcaaggcctcgttcgcagcagataacgtcgacgtcaaagtcgtcgcggagaggctcgcagatggcgtggacgaaacctactccgcagccgatgccgtcaacttcgacgcgatcctcgtggcaaacggagccgagggattgttcgcacgggactcgttcacagcacgccctgcaaactcgaccactgccacactctaccctgcaggccgaccgctccagattttggtggacggattcaggtacggcaagcctgtgggtgcactcggatcgggagcaaaggccctcgatgcagccgaaatctcgactacaagggcaggcgtctatgtcgcgaactcgacaaccgattccttcatcaacggtgtcagggacggcctccgtactttcaaattcctcgatcgcttcgccatcgacgaagacgccgagactagtcatcaccatc

SEQ ID NO: 198 - DNA, 2236 bp, Thermoascus aurantiacus
  gene (1)..(2236)
atgcgagcaatcggcttgttgcctggcatcatcggtatcgcgggtgccgcatgtccctacatgacaggcgagctccctcggtcgttcgccgaaaaccctcacgccattaacaggcgagcggagggaggaggaggcgcagcagccgaaacagaaaagttcttgtcccagttctatttgaacgataacgacacgttcatgactacggatgtcggtggaccgattgaggaccagaactccctctcggcaggagatcgaggacccaccctcttggaagatttcatcctccgtcagaaaattcagcggttcgaccacgaaagggtgccggaacgcgcagtccacgcccgaggcgcaggtgcccatggcgtgttcacttcctacgcagactggtcgaacatcactgcagcgtcgttcctctccgcagcaggcaaggagacacccgtgttcgtcaggttctcgactgtggcaggctccaggggatcggcagacactgcacgcgatgtccatggtttcgccacaaggttctataccgatgagggtaacttcgatatcgtgggcaacaacattcccgtcttcttcatccaggacgccatccagttccccgacttgatccatgcggtgaagccgtcgcccaacaacgaaattcctcaggcagccacagcacacgattcggcatgggacttcttctcgcagcagccgtcgtcgttgcataccctcttctgggccatggcaggacacggaattcctcggtcctatcgaaacatggacggattcggcatccacaccttcaggttcgtcacagacgatggagcgtcgaagttggtgaagttccactggacctccctccagggcaaggcgtcgttggtctgggaagaagcacaggccgtcgcaggcaaaaacgccgattaccacaggcaggatttgtgggatgcgatcgaagcaggacgctatcctgaatgggaattgggtgtgcagatcatggacgaagaagaccagttgcggttcggattcgatttgttggaccctaccaagatcgtccccgaagaatacgtccccatcaccaaattgggcaagatgcagttgaaccgtaacccgttgaactatttcgcggaaactgaacagattatgttccagcctggccacgtggtgaggggcatcgatttcaccgaggaccctttgctccagggccggttgttctcgtacctcgacacccagctcaaccggcatggcggacccaacttcgagcagattcccatcaaccgacctcgcactccgatccataacaacaacagggatggtgcagcacagatgtacatccccttgaacaaggcagcgtacactcccaacacgctcaacaacggttcgcccaagcaggcgaaccagactgtgggcaagggcttcttcaccactcctggacgcactgcctccggcaggctcgtccgagcggtctcgtcgactttcgcggacgtctggtcgcagcccaggctcttctacaactcgctcgtgcctgccgaacagcagttcctcattaacgcaatccgattcgagacggcccacattacgtcggatgtggtcaagaacaacgtgatcatccagctcaaccgagtctccaacaacttggcgaaacgggtggcaagggcgatcggcgtggccgagcccgaacccgaccccaccttgtaccacaacaacaagacagcaaacgtgggcgtgttcggaaagccgttggccaggctcgacggattgcaggtcggcgtcctcgcaaccgtcaacaagccggactccatcaagcaggcagcctccctcaaggcctcgttcgcagcagataacgtcgacgtcaaagtcgtcgcggagaggctcgcagatggcgtggacgaaacctactccgcagccgatgccgtcaacttcgacgcgatcctcgtggcaaacggagccgagggattgttcgcacgggactcgttcacagcacgccctgcaaactcgaccactgccacactctaccctgcaggccgaccgctccagattttggtggacggattcaggtacggcaagcctgtgggtgcactcggatcgggagcaaaggccctcgatgcagccgaaatctcgactacaagggcaggcgtctatgtcgcgaactcgacaaccgattccttcatcaacggtgtcagggacggcctccgtactttcaaattcctcgatcgcttcgccatcgacgaagacgccgagactagtcatcaccatc

SEQ ID NO: 199 - protein, 162 aa, Trichoderma sinuosum
  mat_peptide (1)..(162)
EKDAPVVTGNPDNVEYKAALPKKPFFSDAALAGNVKGFVSAVAAPGGKGVRFSVQFENLPQTGGPFMYHIHQEPATNGNCTSTLAHLDPYNRGETPACDASKPETCQVGDLSGKYGKITSDPFVAEYFDLYTSLQPGNPAFFGNRSIVVHYANKTRLTCANF

SEQ ID NO: 200 - protein, 162 aa, Trichoderma virens
  mat_peptide (1)..(162)
EKDAPVVTGNPSSVEYKATLPKKPFFADAALAGNVKGYVSAVAAPGGKGVRFSVQFENFPKSGGPFMYHIHEEPATNGNCTSTLAHLDPYHRGETPACDSSKPETCQVGDLSGKYGKITSDPFVAEYFDLYTSLQPGSPAFFGNRSIVVHYANKTRLTCANF

SEQ ID NO: 201 - protein, 163 aa, Trichoderma harzianum
  mat_peptide (1)..(163)
EKDAPVVTGNPQSVEYKATLPKKPFFTGADLAGNVKGSVSAVAAPGGKGVRFRVQFENFPKSGGPFMYHIHEEPATNGNCTSTLAHLDPYHRGETPACDASKPETCQVGDLSGKYGKIISDPFVAEYFDLYTSLSPDNPAFFGNRSIVVHYANKTRLTCANFA

SEQ ID NO: 202 - protein, 151 aa, Fusicolla acetilerea
  mat_peptide (1)..(151)
AVAVVRGEQKVAGTVTFEQESESSPTTITWDITGNDANAKRGFHIHTFGDNTNGCTSAGPHFNPHNKTHGAPTDDARHVGDLGNIETDGQGNAKGSTKDSLIKLIGPHSVIGRTVVVHAGTDDLGKGGNEESLKTGNAGPRPACGVIGISN

SEQ ID NO: 203 - protein, 151 aa, Plectosphaerella sp. 1-29
  mat_peptide (1)..(151)
AVAVVRGDSKVTGTVTFEQSSESSPTTITWDISGNDANAKRGMHIHTFGDNTNGCTSAGPHFNPHGKTHGAPSDENRHVGDLGNVETDAQGNAKGTVTDSFVKLIGPESVIGRTVVVHGGTDDLGKGDNEESLKTGNAGPRPACGVIGISN

SEQ ID NO: 204 - protein, 151 aa, Mariannaea punicea
  mat_peptide (1)..(151)
AVAVLRGDASVKGVVTFEQESENAPTTITYDISGQDANAKRGFHIHTFGDNTNGCTSAGPHFNPHGKTHGAPTDEARHVGDLGNIDTDANGNSKGSVQDKLIKLIGPHSIVGRTVVVHAGTDDLGKGGNEESLKTGNAGPRPACGVIGISN

SEQ ID NO: 205 - protein, 150 aa, Penicillium oxalicum
  mat_peptide (1)..(150)
VAVVRGDSKVSGTVTFEQADENAPTTISWNITGNDANAQRGFHVHQFGDNTNGCTSAGPHFNPFGKTHGAPEDSERHVGDLGNFQTDAEGNAVGSKQDKLVKLIGAESVLGRTLVVHAGTDDLGKGGNEESKKTGNAGPRPACGVIGIAA

SEQ ID NO: 206 - protein, 227 aa, Colletotrichum sp-71086
  mat_peptide (1)..(227)
QVQTTGELGDATVVTNPAGFVYEAVLPEEPFFKAGSLDDNVQGSIVAATAPDGKGVEFKVRFSNLPKEGGPFTYHLHVDPVPEDGNCTSTLAHLDPFIRGETPPCNASSPETCQVGDLSGKHGSITTDYEKTYVDPYLSIAQGPGAFFGNRSVVFHFANKTRITCANFKLAVKPDTPANGTASVSATGTVPTATSSPTYVPFPGAASTSGASISLMLMGFAAVMFAL

SEQ ID NO: 207 - protein, 138 aa, Aspergillus sp. nov. XZ3202
  mat_peptide (1)..(138)
TISFSQAGPGTLVNVGGIIQGLTPGLHGFHVHEDPIMDGNCTTGGGHYNPFNMNHGAPTAKVRHVGDLGNIEADENGFAILNIVDSYLQLSGEHSILGRSIVVHADRDDLGLGGQEDSLTTGHAGDRVGCGNIMVPGA

SEQ ID NO: 208 - protein, 298 aa, Trichoderma parapiluliferum
  mat_peptide (1)..(298)
AAKDAPVVSGNSQDVEYKATLPKHAFFSDAALAGNVKGFVSAVAAPGGKGVKFTVQFENFPKTGGPFMYHIHEEPATNGNCTSTLAHLDPYNRGETPACDASKPETCQVGDLSGKYGKITSDPYLAEYFDLYTSLQAGNPAFFGNRSIVVHYANKTRLTCANFAKLQVSSSVTKLAHTTTSSHTTTKAPAATGAHKITGPHNTTSSHHATGSHLTTGPHRTKSPHNTTDVLSPTGVFTHTNIVTAPGSPTTSEGFTTVPPSGSASATSSIVPFPGSASGNKVSISLLGGVVVVMLLFL

SEQ ID NO: 209 - protein, 174 aa, Aspergillus sp. nov. XZ3202
  mat_peptide (1)..(174)
GDTGTTDAPVVTDNKPVSFHHASLLDKDNTTVWGGIQIRSLEGPSALQVEVLIGGIPKGQFLNYHIHEYPVPEDGNCYLTGAHLDPYGRGQEPPCDITKPNTCEVGDLSGKHGPAWAPPGEDFRVTYLDFFLSNTPGEPAYFGDLSWVVHGPGGERLNCGNFEEFGKDWQEWKA

SEQ ID NO: 210 - protein, 181 aa, Trichoderma sinuosum
  PEPTIDE (1)..(181)
MQLSRILTVLSLAVSGCGAEKDAPVVTGNPDNVEYKAALPKKPFFSDAALAGNVKGFVSAVAAPGGKGVRFSVQFENLPQTGGPFMYHIHQEPATNGNCTSTLAHLDPYNRGETPACDASKPETCQVGDLSGKYGKITSDPFVAEYFDLYTSLQPGNPAFFGNRSIVVHYANKTRLTCANF

SEQ ID NO: 211 - protein, 181 aa, Trichoderma virens
  PEPTIDE (1)..(181)
MRVSGILAVFSLAVSGSVAEKDAPVVTGNPSSVEYKATLPKKPFFADAALAGNVKGYVSAVAAPGGKGVRFSVQFENFPKSGGPFMYHIHEEPATNGNCTSTLAHLDPYHRGETPACDSSKPETCQVGDLSGKYGKITSDPFVAEYFDLYTSLQPGSPAFFGNRSIVVHYANKTRLTCANF

SEQ ID NO: 212 - protein, 182 aa, Trichoderma harzianum.
  PEPTIDE (1)..(182)
MRASGILTILSLAVSSCVAEKDAPVVTGNPQSVEYKATLPKKPFFTGADLAGNVKGSVSAVAAPGGKGVRFRVQFENFPKSGGPFMYHIHEEPATNGNCTSTLAHLDPYHRGETPACDASKPETCQVGDLSGKYGKIISDPFVAEYFDLYTSLSPDNPAFFGNRSIVVHYANKTRLTCANFA

SEQ ID NO: 213 - protein, 154 aa, Fusicolla acetilerea
  PEPTIDE (1)..(154)
MVKAVAVVRGEQKVAGTVTFEQESESSPTTITWDITGNDANAKRGFHIHTFGDNTNGCTSAGPHFNPHNKTHGAPTDDARHVGDLGNIETDGQGNAKGSTKDSLIKLIGPHSVIGRTVVVHAGTDDLGKGGNEESLKTGNAGPRPACGVIGISN

SEQ ID NO: 214 - protein, 154 aa, Plectosphaerella sp. 1-29
  PEPTIDE (1)..(154)
MVKAVAVVRGDSKVTGTVTFEQSSESSPTTITWDISGNDANAKRGMHIHTFGDNTNGCTSAGPHFNPHGKTHGAPSDENRHVGDLGNVETDAQGNAKGTVTDSFVKLIGPESVIGRTVVVHGGTDDLGKGDNEESLKTGNAGPRPACGVIGISN

SEQ ID NO: 215 - protein, 154 aa, Mariannaea punicea
  PEPTIDE (1)..(154)
MVKAVAVLRGDASVKGVVTFEQESENAPTTITYDISGQDANAKRGFHIHTFGDNTNGCTSAGPHFNPHGKTHGAPTDEARHVGDLGNIDTDANGNSKGSVQDKLIKLIGPHSIVGRTVVVHAGTDDLGKGGNEESLKTGNAGPRPACGVIGISN

SEQ ID NO: 216 - protein, 150 aa, Penicillium oxalicum; identical to SEQ ID NO: 205

SEQ ID NO: 217 - protein, 247 aa, Colletotrichum sp-71086
  PEPTIDE (1)..(247)
MKVSSVVSVLAAAAVGRVAAQVQTTGELGDATVVTNPAGFVYEAVLPEEPFFKAGSLDDNVQGSIVAATAPDGKGVEFKVRFSNLPKEGGPFTYHLHVDPVPEDGNCTSTLAHLDPFIRGETPPCNASSPETCQVGDLSGKHGSITTDYEKTYVDPYLSIAQGPGAFFGNRSVVFHFANKTRITCANFKLAVKPDTPANGTASVSATGTVPTATSSPTYVPFPGAASTSGASISLMLMGFAAVMFAL

SEQ ID NO: 218 - protein, 154 aa, Aspergillus sp. nov. XZ3202
  PEPTIDE (1)..(154)
MSAVFAIANVAGAVSGTISFSQAGPGTLVNVGGIIQGLTPGLHGFHVHEDPIMDGNCTTGGGHYNPFNMNHGAPTAKVRHVGDLGNIEADENGFAILNIVDSYLQLSGEHSILGRSIVVHADRDDLGLGGQEDSLTTGHAGDRVGCGNIMVPGA

SEQ ID NO: 219 - protein, 316 aa, Trichoderma parapiluliferum
  PEPTIDE (1)..(316)
MRSCRILTVLSAAILGYAAAKDAPVVSGNSQDVEYKATLPKHAFFSDAALAGNVKGFVSAVAAPGGKGVKFTVQFENFPKTGGPFMYHIHEEPATNGNCTSTLAHLDPYNRGETPACDASKPETCQVGDLSGKYGKITSDPYLAEYFDLYTSLQAGNPAFFGNRSIVVHYANKTRLTCANFAKLQVSSSVTKLAHTTTSSHTTTKAPAATGAHKITGPHNTTSSHHATGSHLTTGPHRTKSPHNTTDVLSPTGVFTHTNIVTAPGSPTTSEGFTTVPPSGSASATSSIVPFPGSASGNKVSISLLGGVVVVMLLFL

SEQ ID NO: 220 - protein, 193 aa, Aspergillus sp. nov. XZ3202
  PEPTIDE (1)..(193)
MHSKFIAAAFLGLFFCAAAGDTGTTDAPVVTDNKPVSFHHASLLDKDNTTVWGGIQIRSLEGPSALQVEVLIGGIPKGQFLNYHIHEYPVPEDGNCYLTGAHLDPYGRGQEPPCDITKPNTCEVGDLSGKHGPAWAPPGEDFRVTYLDFFLSNTPGEPAYFGDLSWVVHGPGGERLNCGNFEEFGKDWQEWKA

SEQ ID NO: 221 - DNA, 543 bp, Trichoderma sinuosum
  gene (1)..(543)
atgcaactttctaggatcctaactgtcctttctctcgccgtgtcgggctgtggcgcagagaaagatgcccccgtcgttaccggcaaccctgacaacgtcgaatacaaggccgctctgcccaagaagcccttcttctccgacgctgctctggcgggcaacgtcaagggcttcgtttctgccgtggctgcccctggcggcaagggtgtcaggttcagcgtccaattcgaaaacttgccccaaaccggcgggcccttcatgtatcacatccaccaggagccggctaccaatggcaactgtacatcaaccctggcacatttggacccgtacaatcgtggcgagacccctgcctgcgatgcttccaagcccgagacttgccaagtcggcgatctgagcggcaagtatggcaagatcacctcggatcccttcgtggccgagtactttgacctctacacgtctctccagcccggcaacccggccttctttggcaatcgatcgattgtcgtccattacgcaaacaaaacgcggctgacgtgcgccaacttt

SEQ ID NO: 222 - DNA, 543 bp, Trichoderma virens
  gene (1)..(543)
atgcgagtttctgggatcctggctgtcttttctctcgccgtgtcgggcagtgtcgcagagaaagatgcccccgtcgtaaccggcaatcctagcagtgtcgaatacaaggccactctgcccaagaagcccttcttcgccgatgctgctctggcgggcaatgtcaagggctatgtttctgccgtagctgctcctggtggcaagggcgtcaggttcagtgtgcaattcgaaaacttccccaaaagcggcggcccctttatgtaccacatccacgaggagccagctaccaatggcaactgtacatcaactctggcgcatctggacccgtatcatcgtggcgagacgcctgcctgcgattcttccaagcccgagacttgccaggtcggcgatctgagtggaaagtacggcaagatcacctcggaccccttcgtggccgagtactttgacctgtacacctctctccagcccggcagcccggccttctttggcaatcgatcgatcgtcgtccattacgcaaacaaaacgcggctgacatgcgccaacttt

SEQ ID NO: 223 - DNA, 546 bp, Trichoderma harzianum
  gene (1)..(546)
atgcgcgcctctggaattttgactatcctttctctcgccgtgtcgagctgcgtcgcagagaaagatgcccccgtcgtaaccggcaatcctcaaagcgtcgaatacaaggccactctacccaaaaagcccttcttcaccggcgctgatctggcgggcaacgtcaagggctctgtttccgccgtggctgctcctggtggcaagggcgtcaggttcagagtccaattcgaaaacttccccaagagcggcggcccctttatgtaccacatccacgaagagccggctaccaatggcaactgtacgagcaccctggctcatctggacccgtatcatcgcggcgagacgcccgcttgcgatgcttccaagcccgagacttgtcaggttggtgatctgagtggcaagtacggcaagatcatctcggatccgttcgtggccgagtactttgacctctacacctctctttcgcccgacaacccggccttctttggcaatcgatcgatcgtcgtccactatgcgaacaaaacgcggctgacgtgcgccaactttgcc

SEQ ID NO: 224 - DNA, 943 bp, Fusicolla acetilerea
  gene (1)..(943)
atggtcaaagcaggtacgaactccactccagaatgccagcggcagctctgggagctaccatcccttttataaccccaaggcatatgcgtcatcattggagagaggaggggtttcgagctcatttgagcgggtttctgtctcgttgtatggcaggatggtacagtgctgtaccttgatggactcagccctacgactatctcgaccttgatggcccgacattggcaacaccatacgcatatcagaatgttcattggctaacatctcattcaaatgtagttgctgtcgtccgcggagaacagaaggtggccggtactgtcacgttcgagcaggagtctgagtcctcgcctactactatcacctgggatatcactggcaacgacgccaacgccaagcgaggtttccatatccacaccttcggtgacaacaccaacggttgcacctctgccggtcctcactgtaagtcccgccaccgccgccgggtcttccggcttgttcggagctagcccggagcgggagcgttcaaacgggttcggaatagatgctgatggcgtttgaatatagtcaacccccacaacaagactcacggtgctcccactgacgacgcccgtcacgttggtgatctcggcaacatcgagactgatggccagggtaacgccaagggctctaccaaggacagcctgatcaagctcattggtccccacagcgttattggcgtaagaacaaattctcgtcctttatcaattgaagagttatgatgctaacaaaatcagcgaactgtcgttgtccacgccggcactgacgatctcggcaagggtggaaacgaggagtccctcaagactggcaacgctggtccccgacctgcttgcggtaagtgaacattcatcgaaatgtgggagatattgtgctaatgaattgttaaggtgtcattggtatctccaactaa

SEQ ID NO: 225 - DNA, 995 bp, Plectosphaerella sp. 1-29
  gene (1)..(995)
atggtcaaggctggtaagtgcagacttgtcgtccttttataccttcggcagccacgtgcggcggtgtcagccgggatggatggaggggctgcaaacgagctggattgagcgagtttctctggttggctacgcgcatcatcttataggagcacgacttctcggacgcgtccaccctgatggcctcgctcttcttctctgtccaagctccgagccgcacggggcggaatagccccagcccggtttaggccgcccatcaaggttgctgatgatgataccaaacccgggccggcgtgcgtcgggtcctgtgtcgcagcctttcctctcgtctctagcagcgccacgggagacatgatgctaataaccactcttagttgctgtcgtccgtggtgactccaaggtcaccggtaccgtcaccttcgagcagtcgtccgagtcttcccctaccaccatcacctgggacatctccggcaacgacgccaatgccaagcgtggcatgcacatccataccttcggtgacaacaccaacggctgcacctccgccggtcctcactgtaagctcacccctacccctcaccgcatgggtaaccaagaacccagctgactctggcgcccaaacagtcaaccctcacggcaagacccacggcgctcccagcgacgagaaccgccacgttggcgacctcggcaacgtcgagaccgatgcccagggcaacgccaagggcaccgtcaccgactccttcgtcaagctgatcggccccgagagcgtcatcggcgtaagtcacaggcagaccgatggacgcaagaatggttgtgctaacgggagagcagcgcaccgtcgtcgttcacggcggcaccgacgacctcggcaagggcgacaacgaggagtccctcaagactggcaacgccggcccccgccccgcctgcggtacgttggtttaatgggatagctttctgctcgatactgacaatttacaggcgtcattggcatctccaactaa

SEQ ID NO: 226 - DNA, 1118 bp, Mariannaea punicea
  gene (1)..(1118)
atggtcaaggctggtaggtttccacaactctccgatccttggggggaggcattccctctctatatagcacacactttgctgcgtgctgcagctctgccagccaaacaaaaaggagggggggaattgcgctgatttgagcgggtttcttgtctcgtccaacggaatgggcggatcgcgccgtgccagaccttgatggcctccagccctacgcatcgagcacaagcatgacgtctcatcatgagtcccttgatggtcatcttttgagacgccacacatgtgttcggcagttggccttctagacgggacttcagcctgcctcgagtccgctgcgccagccccatgtcagctcgccagagcttcgctatgaatgcctttattggtggctcgtgatatcacatttgctaactcgtctgtttcccaacagttgctgtcctccgtggtgacgctagcgtcaagggtgttgtcaccttcgagcaggagtccgagaacgctcccaccaccatcacctacgatatctccggccaggatgccaacgccaagcgtggtttccacatccacaccttcggtgacaacaccaacggctgcacttctgccggccctcactgtgagtaacacaaacgcattttcctctaccctgcaatgcggcgtgcccagcatccttgaggcgcacggatcgaggggcacgctcatccacagttatgagcctttgctaacttgcaattctcaaacagttaacccccacggcaagacccacggtgctcctaccgatgaggcccgtcacgtcggtgatcttggcaacatcgacaccgatgccaatggcaactccaagggctctgtccaggacaagctcatcaagctcattggcccccactccattgttggcgtaaggatctgattctcggatgcaaaagggacacactagactaaccactggattagcgaaccgttgtcgttcacgccggcactgacgaccttggcaagggcggtaacgaggagtccctcaagactggcaacgctggtccccgacccgcttgcggtacgcacccaacgagctcgtttttttactgtcccagtattctaacatgttgtttccaggtgtcattggtatctccaactag

SEQ ID NO: 227 - DNA, 696 bp, Penicillium oxalicum
  gene (1)..(696)
gttgctgtcgtccgcggagactccaaggtctctggcaccgtcaccttcgagcaggctgacgagaacgcccctaccaccatctcctggaacatcaccggcaacgacgccaacgctcagcgcggtttccacgttcaccagttcggtgacaacaccaacggctgcacctccgctggccctcactgtaagcctccccacattatcaaatatctcgggcccctctacctggatggagacgagaggagccaaccaaggcaagagattcattatactaatccgttccctccccgcatccttcagtcaaccccttcggcaagacccacggtgctcccgaggactctgagcgtcacgtcggtgacctcggtaacttccagaccgatgctgagggtaacgctgttggctccaagcaggacaagcttgtcaagctgatcggtgctgagagcgttctcggcgtaagtccaacaagctctcattttgccctcctgaacttgacacagaatactgactctatggaatagcgtactctggttgtgcacgccggtactgacgaccttggcaagggtggcaacgaggagtccaagaagactggtaacgccggcccccgtcctgcctgcggtaagtcctctgaatgctctttagaatgttgctcgagttcagactgctaatatgatcacaggtgtcattggtatcgccgcttaa

SEQ ID NO: 228 - DNA, 860 bp, Colletotrichum sp-71086
  gene (1)..(860)
atgaaggtctcttccgtcgtttccgttcttgctgctgcggccgttggccgtgttgcggcccaggtccaaactactggtgtaggttgcttgtgtctctcgcatgccggggctttatccgctgactttaccccgtcgtaggaacttggtgatgccactgtcgtgaccaacccagctggtttcgtgtacgaggctgtcttgcccgaggagcccttcttcaaggcggggtcgttggacgacaacgtccaaggttccattgtcgccgctactgctcccgatggaaagggtgtcgagttcaaggtccgattctccaacctccccaaggagggtggtcctttcagtaagtcctcccgcaaagccgcagacactcgagaatcatttctgacacccgaccagcctaccaccttcacgtcgaccccgttcctgaagatggaaactgcacttcaactctcgctcacctcgacccctttatccgcggtgagaccccgccctgcaatgcctcgagccccgagacttgccaggtcggcgacttgagcggcaagcatggctccatcaccaccgattacgaaaagacctatgtcgatccctacctctccatcgcccagggtcccggcgccttcttcggcaaccgcagcgtcgtcttccacttcgccaacaagactcgcatcacctgcgccaacttcaagctcgccgtgaagcctgacacgcccgctaacggcaccgcgtccgtcagcgccaccggcacggtgcccactgccacctcttcgccgacttatgtgcccttccccggtgcggcttccaccagcggtgcctccatctctttgatgctcatgggcttcgccgccgtcatgttcgcgctctga

SEQ ID NO: 229 - DNA, 799 bp, Aspergillus sp. nov. XZ3202
  gene (1)..(799)
atgtccgccgtttttgctagtgagtctcatccactccttcatcgcttctgctgtgggatctgagtctgggcctgtacgcaattctcaccaaaatgcccaaagagtccatccaagcatctgaacgcccgctccaatatttttctacccaccactcgcgctaactcatttgtcttcatagtcgccaacgtcgcaggtgccgtctcggggaccattagcttctcgcaggccggtccaggaacgctagtcaatgtcggcggcatcatccagggactgacccccgggttacacggattccacgttcacgaggatccaataatggatggcaattgcacgactggcggtggccattgtacgttcctcccagagaactcgagatcgtttggctcataacatctccccaatagacaaccccttcaacatgaaccacggggctcctacggccaaggtccgccacgtcggtgacctgggcaacatcgaggcggacgagaatggctttgcgatcctcaacatcgtcgatagctatctccagctatcgggcgaacacagcattctaggtgtaagttgggacgcctcattgtgattcggggtgctacgggttaaactgacgtctgcaaatcaaatcagcgttctatcgttgttcatgccgacagggatgaccttggcttgggaggccaggaggactccctgacgactggccacgctggggatcgtgttggttgcggtatgtcctccacccacgttttctttttcggattagtagctgacggcagtaggcaacatcatggttccgggtgcttga

SEQ ID NO: 230 - DNA, 1019 bp, Trichoderma parapiluliferum
  gene (1)..(1019)
atgcggtcttgtcgtattctaacggttctctctgccgctatattgggctacgccgcagctaaagacgctcccgtcgtttctggcaattctcaagatgtcgaatacaaggccactctgcccaaacatgcctttttctccgatgctgcgcttgcgggtaacgtaaaggggtttgtctcggctgtagctgctcccggtggcaagggcgtcaaattcaccgtccaattcgaaaattttcccaaaacgggcggtcccttcagtgagtgtcatgtccatctgaaaagcgatgtggcggcgtcgtagtggctaatcaactgatgtatgcagtgtaccacatccatgaggagccagctaccaatggcaactgcacgtcgaccctggcgcatttggacccgtacaatcgtggcgagacgcctgcttgcgatgcttccaagcccgaaacttgccaagtcggtgatctgagtgggaaatacggcaagatcacctcagatccttacttggccgagtatttcgacctctacacgtctctccaggcgggcaacccggccttctttggcaatcggtcgattgtcgtccattacgcgaacaaaacgcggctgacctgtgccaactttgccaagctgcaggtctcaagcagtgtcacaaagttggcccacactaccaccagctctcatactactactaaggcccctgctgccactggtgctcacaagatcactggacctcacaatacaacaagctcccaccatgccacaggttctcatcttaccactggtcctcatcgtactaaaagcccccacaacactacagacgtcctctctccaacgggcgttttcactcataccaacattgtaactgctcctggtagtcctaccacttcagaaggcttcactaccgttcctcctagtggcagtgcgagtgccacatcatctattgttccctttccggggagtgcgtctggaaacaaagtctccatctctctactgggtggcgtcgttgttgtaatgctcctcttcctgtga

SEQ ID NO: 231 - DNA, 671 bp, Aspergillus sp. nov. XZ3202
  gene (1)..(671)
atgcattccaaattcatcgcagctgccttcctgggcctgttcttttgtgcagctgccggagacactggtactactgatgctcccgttgtgaccgacaacaaacccgtatcctttcaccacgccagtctcctcgacaaggacaacaccaccgtttggggcggtattcagattcgctcgctcgaaggaccctccgctctccaggtcgaggtcttgataggaggaatcccaaagggccagttcctgagtacgtcgcttaaaaaacctccatgtgtacctaatttctgccatcaagttacaaagtcatgtcatgtctgactggctttgcgcaaacagactaccacatccacgaataccccgtccccgaagatggtaactgctatttaaccggtgcccatctcgacccctacggccgcggacaagaacctccttgtgacatcacgaaacccaacacttgtgaagttggtgacctgagcgggaagcatgggcctgcttgggcgccgcccggtgaagatttccgggttacatacttagacttctttctttcgaatacgcctggcgaaccggcttacttcggggatctatcctgggtggtccatgggcccggtggcgagaggctaaattgtggtaacttcgaggagtttgggaaagactggcaagagtggaaagcttga

SEQ ID NO: 232 - protein, 169 aa, Mucor sp. XZ2651
  mat_peptide (1)..(169)
KPTPYYDDYPLKAVVVLTNDSQNVTGTVTFTQAYRNGGTEVYAKIKGLVSGTKHGMHVHETGDLSGGCETLGLHFNPFNQDHGSPTSKVRHVADFGNIEEYDDDWATLKLDIPSLRLDGRNSIIGRGLVLHSGEDDLGLGDSPLSKTVGNSGARLACGIVGIAAWGKDN

SEQ ID NO: 233 - protein, 151 aa, Rhizomucor miehei
  mat_peptide (1)..(151)
IIGTVYFTQSGGPYGPTTIHANISGVGPGLHGMHVHEYGDLSNGCESMGLHFNPYNQDHGGPFDKVKHVGDFGNVNVDESGHADFTLTVDSLTLEGPNSIIGRGIILHSGVDDLGRGNATSKIAGNSGSRLACGVIGIPNPNNTYWQSHHY

SEQ ID NO: 234 - protein, 167 aa, Mucor sp. XZ2651
  mat_peptide (1)..(167)
LPTPYYDEFPLKAVVVLGNAAMNTTGIVTFTQESADGPTKVYANITGLATGTKHGFHIHETGDLSGGCETLGLHFNPFNQDHGSPYSKVRHVGDFGNIEQEDGEDYATLTLTIPTLKLSGHTSVIGRGLVLHSGEDDLGLGDSPLSKTVGNSGARLACGVIGIAASN

SEQ ID NO: 235 - protein, 224 aa, Amphisphaeriaceae sp-43674
  mat_peptide (1)..(224)
FPETGKLGNATAVTNNPAGKMAMATLPQKPFTAASSLEGNVKGTLSVKTGAGGVGVEYTVNLSNLPKSGGPFLYHIHQNKVPDNGNCTATLAHLDPFLRGEVTDCDPSYPPQTCQVGDLSGKYGKITADPFTVTYTDPYGSLMDGSNASIHDRSFVVHFANKTRITCANFAVVSSNYTTTPTTYPTGTARPTATYSSVVTAAANALNVAGGLAVIPMAALFYLF

SEQ ID NO: 236 - protein, 244 aa, Humicola fuscoatra
  mat_peptide (1)..(244)
QSSTVTPAPEATSNPAGVAFEAEFSGYGGSLQGSIIGASSEDGKGVKFEISVDGLPEDLGPFMYHIHKFPVLNGNCTSAGSHLDPYNRGEVPPCDKSKKETCEVGDLSGKYRNLTGRADSDSYTDLYASTDAKNVAFFGDKSIVLHANDKKRIACANFRLKEGGGDYSSGGTPAPTGGNPGHGNSTVLPTGTGGGNPGPSQTPSFTPGEPTQPTDSPLPTDGSGAGKVTVAGLGLFAGALAFLL

SEQ ID NO: 237 - protein, 240 aa, Valsaria rubricosa
  mat_peptide (1)..(240)
QTLPSAPKKTNSPIGAEYVATLEASDNKPVSGSVTAKAVSSGIKFDIAVAGFPDVGAPFSYHIHEAPVPEDGNCTKALAHLDPTGRGETPACDASAPETCQVGDLAGKYGKFNGTSFTKEFVDPYVSLKVGDDAFFGNRSIVFHYANKTRIACANFNLVNAGSNSSYPVATGTGAYGTAAPSGTGASGHGNSTATGTGPFVTSPAPTQPESPEKTSSDSGAATMFASTGVLMVALVAALL

SEQ ID NO: 238 - protein, 186 aa, Mucor sp. XZ2651
  PEPTIDE (1)..(186)
MRFTGLALAAFISAVLAKPTPYYDDYPLKAVVVLTNDSQNVTGTVTFTQAYRNGGTEVYAKIKGLVSGTKHGMHVHETGDLSGGCETLGLHFNPFNQDHGSPTSKVRHVADFGNIEEYDDDWATLKLDIPSLRLDGRNSIIGRGLVLHSGEDDLGLGDSPLSKTVGNSGARLACGIVGIAAWGKDN

SEQ ID NO: 239 - protein, 164 aa, Rhizomucor miehei
  PEPTIDE (1)..(164)
MVNAIAILQSATAIIGTVYFTQSGGPYGPTTIHANISGVGPGLHGMHVHEYGDLSNGCESMGLHFNPYNQDHGGPFDKVKHVGDFGNVNVDESGHADFTLTVDSLTLEGPNSIIGRGIILHSGVDDLGRGNATSKIAGNSGSRLACGVIGIPNPNNTYWQSHHY

SEQ ID NO: 240 - protein, 184 aa, Mucor sp. XZ2651
  PEPTIDE (1)..(184)
MRFTGLAIAAFITSVFALPTPYYDEFPLKAVVVLGNAAMNTTGIVTFTQESADGPTKVYANITGLATGTKHGFHIHETGDLSGGCETLGLHFNPFNQDHGSPYSKVRHVGDFGNIEQEDGEDYATLTLTIPTLKLSGHTSVIGRGLVLHSGEDDLGLGDSPLSKTVGNSGARLACGVIGIAASN

SEQ ID NO: 241 - protein, 242 aa, Amphisphaeriaceae sp-43674
  PEPTIDE (1)..(242)
MQMTTIVSLLAVGAAAQSFPETGKLGNATAVTNNPAGKMAMATLPQKPFTAASSLEGNVKGTLSVKTGAGGVGVEYTVNLSNLPKSGGPFLYHIHQNKVPDNGNCTATLAHLDPFLRGEVTDCDPSYPPQTCQVGDLSGKYGKITADPFTVTYTDPYGSLMDGSNASIHDRSFVVHFANKTRITCANFAVVSSNYTTTPTTYPTGTARPTATYSSVVTAAANALNVAGGLAVIPMAALFYLF

SEQ ID NO: 242 - protein, 261 aa, Humicola fuscoatra
  PEPTIDE (1)..(261)
MRYSTVALAAAATAVSAQSSTVTPAPEATSNPAGVAFEAEFSGYGGSLQGSIIGASSEDGKGVKFEISVDGLPEDLGPFMYHIHKFPVLNGNCTSAGSHLDPYNRGEVPPCDKSKKETCEVGDLSGKYRNLTGRADSDSYTDLYASTDAKNVAFFGDKSIVLHANDKKRIACANFRLKEGGGDYSSGGTPAPTGGNPGHGNSTVLPTGTGGGNPGPSQTPSFTPGEPTQPTDSPLPTDGSGAGKVTVAGLGLFAGALAFLL

SEQ ID NO: 243 - protein, 258 aa, Valsaria rubricosa
  PEPTIDE (1)..(258)
MRSSILFSVLAATSLVTAQTLPSAPKKTNSPIGAEYVATLEASDNKPVSGSVTAKAVSSGIKFDIAVAGFPDVGAPFSYHIHEAPVPEDGNCTKALAHLDPTGRGETPACDASAPETCQVGDLAGKYGKFNGTSFTKEFVDPYVSLKVGDDAFFGNRSIVFHYANKTRIACANFNLVNAGSNSSYPVATGTGAYGTAAPSGTGASGHGNSTATGTGPFVTSPAPTQPESPEKTSSDSGAATMFASTGVLMVALVAALL

SEQ ID NO: 244 - DNA, 619 bp, Mucor sp. XZ2651
  gene (1)..(619)
atgcgtttcactggtcttgcacttgccgctttcatctctgctgttcttgccaaacccactccctattacgacgactaccctctcaaagccgtagttgttcttaccaacgactctcaaaacgtcactggaactgtcactttcacacaagcttatcgtaacggaggcactgaggtctatgccaagatcaaaggtctcgtctccggtactaaacacggcatgcacgtgcatgaaactggcgatctctctggtggctgcgaaactctcggtctgcacttcaaccctttcaatcaagaccacggtagtcccaccagcaaggtccgtcacgtcgctgattttggaaatatcgaagaatacgatgatgactgggctactcttaagttggatattccttctcttcgcttagatggccgcaactctattattggtcgtggtctcgttcttcattcgggagaagatgatcttggcttaggtgattctccattgtcaaagactgtcggaaattctggtgctcgtttagcttgcggtattgttggcagtaagtacaacacatgatgtatttccgatcagtaaactaatccatttctaattaatagttgctgcttggggcaaggataattaa

SEQ ID NO: 245 - DNA, 718 bp, Rhizomucor miehei
  gene (1)..(718)
atggtcaacgcaattgctattctccaatccgctactgctatcattggtaccgtttattttacccagtcaggtggtccatatggtcctacgaccattcatgcaaacatatctggcgttggtcctggtctgcatggcatgcacgtgcatgaatatggcgatctaagcaatggtaaatgcatttttcattgtttcatcgacttgtcattctatagttctactaactcatcctttcttcgtctctccttctaggttgtgaatctatgggccttcattttaacccttacaatcaggatcacggtggaccgtttgacaaggtcaagcacgttggcgactatggaaacgtcaaggttgatgaatcaggtcacgccgactttacattgactgtggacagtttgactttggaaggtcccaactccattattgggtaggttccttagttgaaaaaagaaaaataccagtgtcctttttttctctaaacatcatacaacgctgttggttgtagccgcggtatcattcttcacagtggtgtcgatgatttgggtagaggtaatgctacctcgaaaattgccggcaactctggatcccgcttggcctgcggtgtcattggcagtatgtattcctcacttttcttgtctacagccgcgcaaagtgctaaaatttacctttttgtctagtccccaatccaaacaatacttactggcagtcccaccactactaa

SEQ ID NO: 246 - DNA, 606 bp, Mucor sp. XZ2651
  gene (1)..(606)
atgcgtttcactggtcttgctattgctgctttcatcacctcagtttttgccttacccactccctactacgatgagttcccactcaaggctgtcgtagtgcttggtaatgccgcaatgaataccactggtattgttacctttactcaagaaagcgctgatggacctactaaagtctacgccaacattactggccttgctacaggtaccaagcacggattccatatccacgaaactggcgatctttctggtggctgtgagactcttggacttcactttaaccctttcaaccaagatcatggtagtccttatagcaaagtacgtcacgttggcgattttggaaacatcgagcaagaagatggtgaagattatgccacgctcacactgacaattcctactctcaagttatctggacatacaagtgttattggtcgtggccttgtacttcattcaggtgaagacgatctcggattaggcgattctccattatcaaagactgtaggcaactcaggtgctcgtttagcatgtggtgtcattggcagtaagtatagtttatcacagtccttttttgtttaactaattcaattattagtcgctgcaagcaattaa

SEQ ID NO: 247 - DNA, 789 bp, Amphisphaeriaceae sp-43674
  gene (1)..(789)
atgcagatgaccacgattgtttcgctgctggccgtcggtgccgctgcgcagagcttccccgagactggcgtacgttgtcctgcgcaaaagcaaagattccacgggtgctaacatgttgccgacatgcagaagcttggcaacgccacggccgtcaccaacaaccctgccggcaagatggccatggcgacgctgccccagaagccgttcacggccgccagcagcctggagggcaacgtcaagggtacgctgagcgtcaagacgggcgccggcggcgtcggcgtcgagtacacggtcaacctgtccaacctgcccaagtcgggcggcccgttcctgtaccacatccaccagaacaaggtgcccgacaacggcaactgcaccgcgacgctcgcccacctggaccccttcctgcgcggcgaggtgacagactgcgacccctcgtacccgccccagacctgccaggtcggcgacctgagcggcaagtacggcaagatcacggccgaccccttcaccgtcacctacacggacccctacggctcgctgatggacggctccaacgcctcgatccacgaccgcagcttcgtcgtccactttgccaacaagacgcgcatcacctgcgccaactttgccgtcgtcagcagcaactacaccaccacccccaccacctacccgaccggcaccgcccgccctaccgccacttactcgagcgtcgtcaccgctgcggctaacgcgctcaacgttgccggcggtctcgccgtcatccccatggctgcgcttttctacctcttctaa

SEQ ID NO: 248 - DNA, 907 bp, Humicola fuscoatra
  gene (1)..(907)
atgcgttactctactgttgcccttgccgctgcggccaccgccgtgagcgcccaatcgtcgactgtcactcctgctcccgaggccacgagcaatcctgccggcgtcgccttcgaagcagagttctcaggctatggcgggtcgctccaggggagcataattggagccagcagcgaggacggcaagggtgtcaagttcgaaatcagcgtcgatggcctccctgaggatctaggccccttcagtgagttccccattgctttgttttccttctcgttggcgaaattttgctgaccgtccctcagtgtaccacatccacaagttccctgtcttgaatggcaactgcacttcggcgggctctcacctggacccctacaaccgcggcgaggtccccccgtgcgacaaatccaagaaggaaacgtgcgaggttggcgatctgagcggaaagtaccgcaacctgactggccgcgccgatagcgactcgtaagtcgaaaaagaccccgagcacaccccctcgagcaaaagtctaactctctgtcccagctacaccgacctgtacgcctcgacggacgccaagaacgtggccttcttcggcgacaagtccatcgtcctccacgccaacgacaagaagcgcatcgcctgcgcaaacttccgcctcaaggagggcggcggcgactactcttccggcggcactcctgcccctaccggcggcaaccctggccacggcaacagcaccgtcctgcccaccggcactggcggtggcaacccgggacccagccagacccctagcttcacccccggcgagcctacccagcctaccgactctcctctgcccaccgacggcagcggcgcgggcaaggtgactgtcgctggcctaggtctcttcgccggcgccctcgccttcctgctctaa

SEQ ID NO: 249 - DNA, 930 bp, Valsaria rubricosa
  gene (1)..(930)
atgcgttcttccatcctcttttccgtcctcgcggccacctcgctcgtgaccgcccagacgctcccttccgcgcccaagaagaccaacagcccgatcggtgctgagtacgtcgcgactctcgaggcctccgacaacaagcccgtctccggctccgtcaccgcgaaggccgtgtccagcggcatcaagttcgacatcgccgtcgccggatttcccgacgttggtgcaccgttctgtacgttctttcccatccctcgcaccgtgtaacctgacgatgcgatcggaggctaacaccacattcccttacagcgtaccacatccacgaagctcccgtccccgaggatggcaactgcaccaaggccttggcccaccttgacccgactggccgcggcgagactcccgcctgcgatgccagcgctcccgagacttgccaggtcggtgatctggctggcaagtatggcaagttcaacggaacgtccttcaccaaggagtaagtgaaccctcgtccgcttcttcgttatccgttcctcggcatctccaacgactaacgcgtgctccccgctcaccaggttcgtcgatccctacgtctccctgaaggtcggcgacgatgccttcttcggcaaccgctccatcgtcttccactacgccaacaagacccgcatcgcctgcgccaacttcaacctcgtcaacgctggctcaaacagctcgtacccggtcgctaccggcactggcgcctacggcaccgccgctccctccggaaccggcgcgagcggtcacggtaactcgactgctaccggcaccggtcccttcgtcacctcgcccgctccgacccagcccgagtccccggagaagacctcctcggacagcggtgccgccaccatgttcgcgtccaccggcgtcctgatggtcgctctcgtcgccgctctgttgtag

SEQ ID NO: 250 - protein, 724 aa, Thermoascus aurantiacus
  mat_peptide (1)..(724)
ACPYMTGELPRSFAENPHAINRRAEGGGGAAAETEKFLSQFYLNDNDTFMTTDVGGPIEDQNSLSAGDRGPTLLEDFILRQKIQRFDHERVPERAVHARGAGAHGVFTSYADWSNITAASFLSAAGKETPVFVRFSTVAGSRGSADTARDVHGFATRFYTDEGNFDIVGNNIPVFFIQDAIQFPDLIHAVKPSPNNEIPQAATAHDSAWDFFSQQPSSLHTLFWAMAGHGIPRSYRNMDGFGIHTFRFVTDDGASKLVKFHWTSLQGKASLVWEEAQAVAGKNADYHRQDLWDAIEAGRYPEWELGVQIMDEEDQLRFGFDLLDPTKIVPEEYVPITKLGKMQLNRNPLNYFAETEQIMFQPGHVVRGIDFTEDPLLQGRLFSYLDTQLNRHGGPNFEQIPINRPRTPIHNNNRDGAAQMYIPLNKAAYTPNTLNNGSPKQANQTVGKGFFTTPGRTASGRLVRAVSSTFADVWSQPRLFYNSLVPAEQQFLINAIRFETAHITSDVVKNNVIIQLNRVSNNLAKRVARAIGVAEPEPDPTLYHNNKTANVGVFGKPLARLDGLQVGVLATVNKPDSIKQAASLKASFAADNVDVKVVAERLADGVDETYSAADAVNFDAILVANGAEGLFARDSFTARPANSTTATLYPAGRPLQILVDGFRYGKPVGALGSGAKALDAAEISTTRAGVYVANSTTDSFINGVRDGLRTFKFLDRFAIDEDAE

SEQ ID NO: 251 - protein, 740 aa, Thermoascus aurantiacus
  PEPTIDE (1)..(740)
MRAIGLLPGIIGIAGAACPYMTGELPRSFAENPHAINRRAEGGGGAAAETEKFLSQFYLNDNDTFMTTDVGGPIEDQNSLSAGDRGPTLLEDFILRQKIQRFDHERVPERAVHARGAGAHGVFTSYADWSNITAASFLSAAGKETPVFVRFSTVAGSRGSADTARDVHGFATRFYTDEGNFDIVGNNIPVFFIQDAIQFPDLIHAVKPSPNNEIPQAATAHDSAWDFFSQQPSSLHTLFWAMAGHGIPRSYRNMDGFGIHTFRFVTDDGASKLVKFHWTSLQGKASLVWEEAQAVAGKNADYHRQDLWDAIEAGRYPEWELGVQIMDEEDQLRFGFDLLDPTKIVPEEYVPITKLGKMQLNRNPLNYFAETEQIMFQPGHVVRGIDFTEDPLLQGRLFSYLDTQLNRHGGPNFEQIPINRPRTPIHNNNRDGAAQMYIPLNKAAYTPNTLNNGSPKQANQTVGKGFFTTPGRTASGRLVRAVSSTFADVWSQPRLFYNSLVPAEQQFLINAIRFETAHITSDVVKNNVIIQLNRVSNNLAKRVARAIGVAEPEPDPTLYHNNKTANVGVFGKPLARLDGLQVGVLATVNKPDSIKQAASLKASFAADNVDVKVVAERLADGVDETYSAADAVNFDAILVANGAEGLFARDSFTARPANSTTATLYPAGRPLQILVDGFRYGKPVGALGSGAKALDAAEISTTRAGVYVANSTTDSFINGVRDGLRTFKFLDRFAIDEDAE
